(19) United States
(12) Patent Application Publication
(10) Pub. No.: US 2005/0003494 A1
(43) Pub. Date: Jan. 6, 2005

(54) Mutated gene from corynebacterium glutamicum

(76) Inventors: Oskar Zelder, Speyer (DE); Markus Pompejus, Freinsheim (DE); Hartwig Schroder, Nussloch (DE); Burkhard Kroger, Limburgerhof (DE); Corinna Klopprogge, Mannheim (DE); Gregor Haberhauer, Limburgerhof (DE)

Correspondence Address: LAHIVE & COCKFIELD, LLP., 28 STATE STREET, BOSTON, MA, 02109, US

(21) Appl. No.: 10/494,672

(22) PCT Filed: Oct. 31, 2002
(86) PCT No.: PCT/EP02/12134

(30) Foreign Application Priority Data
Nov. 5, 2001 (DE) 101 54 177.5

(51) Int. Cl. C12P 13/08; C07H 21/04; C12N 15/74; C12N 1/21

(52) U.S. Cl. 435/115; 435/252.33; 435/488; 536/23.2

(57) ABSTRACT

The invention relates to a novel nucleic acid molecule, to the use thereof for constructing genetically improved microorganisms and to methods for preparing fine chemicals, in particular amino acids, with the aid of said genetically improved microorganisms.

### BACKGROUND OF THE INVENTION

[0001] Particular products and byproducts of naturally occurring metabolic processes in cells are used in many branches of industry, including the food industry, the animal feed industry, the cosmetic industry and the pharmaceutical industry. These molecules which are collectively referred to as “fine chemicals” comprise organic acids, both proteinogenic and nonproteinogenic amino acids, nucleotides and nucleosides, lipids and fatty acids, diols, carbohydrates, aromatic compounds, vitamins and cofactors and also enzymes. They are best produced by means of cultivating, on a large scale, bacteria which have been developed to produce and secrete large amounts of the molecule desired in each particular case. An organism which is particularly suitable for this purpose is Corynebacterium glutamicum, a Gram-positive nonpathogenic bacterium. Using strain selection, a number of mutant strains have been developed which produce various desirable compounds. The selection of strains which have been improved with respect to the production of a particular molecule is, however, a time-consuming and difficult process.

### BRIEF DESCRIPTION OF THE INVENTION

[0002] The present invention provides novel nucleic acid molecules which can be used for identifying or classifying Corynebacterium glutamicum or related bacteria species. C. glutamicum is a Gram-positive aerobic bacterium which is widely used in industry for the large-scale production of a number of fine chemicals and also for the degradation of hydrocarbons (e.g. in the case of crude oil spills) and for the oxidation of terpenoides. The nucleic acid molecules may therefore be used for identifying microorganisms which can be used for producing fine chemicals, for example by fermentation processes. Although C. glutamicum itself is nonpathogenic, it is, however, related to other Corynebacterium species, such as Corynebacterium diphtheriae (the diphtheria pathogen), which are major pathogens in humans. The ability to identify the presence of Corynebacterium species may therefore also be of significant clinical importance, for example in diagnostic applications. Moreover, said nucleic acid molecules may serve as reference points for mapping the C. glutamicum genome or the genomes of the related organisms.

[0003] These novel nucleic acid molecules encode proteins which are referred to herein as Marker- and fine chemical-producing (MCP) proteins. These MCP proteins may, for example, be involved directly or indirectly in the production of one or more fine chemicals in C. glutamicum. The MCP proteins of the invention may also be involved in the degradation of hydrocarbons or in the oxidation of terpenoides. Said proteins may be used for identifying Corynebacterium glutamicum or organisms related to C. glutamicum; the presence of an MCP protein specific for C. glutamicum and related species in a mixture of proteins may indicate the presence of one of said bacteria in the sample. Furthermore, these MCP-protein may have homolog in plants or animals, which are involved in a diseased state or an illness; thus, these proteins may serve as useful pharmaceutical targets for drug screening and the development of therapeutic compounds.

[0004] Owing to the availability of cloning vectors which can be used in Corynebacterium glutamicum, as disclosed, for example, in Sinskey et al., U.S. Pat. No. 4,649,119, and of techniques for the genetic manipulation of C. glutamicum and the related Brevibacterium species (e.g. lactofermentum) (Yoshihama et al., J. Bacteriol. 162:591-597 (1985); Katsumata et al., J. Bacteriol. 159:306-311 (1984); and Santamaria et al. J. Gen. Microbiol. 130:2237-2246 (1984)), the nucleic acid molecules of the invention can be used for genetic manipulation of said organism in order to modulate the production of one or more fine chemicals. This modulation may take place due to a direct effect of the manipulation of a gene of the invention or due to an indirect effect of such a manipulation. For example, it is possible, by modifying the activity of a protein which is involved in the biosynthesis or degradation of a fine chemical (i.e. by mutagenesis of the corresponding gene), to directly modulate the ability of the cell for synthesizing or degrading said compound, thereby modulating the yield and/or the efficiency of production of the fine chemical. Likewise it is possible, by modulating the activity of a protein which regulates a fine-chemical metabolic pathway, to influence directly, whether the production of the desired compound is up or down regulated, both of which modulate the yield or efficiency of production of the fine chemical from the cell.

[0005] The indirect modulation of the production of fine chemicals may also be carried out by modifying the activity of a protein of the invention (i.e. by mutagenesis of the corresponding gene) so that the ability of the cell to grow and to divide or to remain viable or productive is increased overall. The production of fine chemicals from C. glutamicum is usually achieved by large-scale fermentative culturing of said microorganisms conditions which are frequently suboptimal for growth and cell division. Modifying a protein of the invention (e.g. a stress reaction protein, a cell wall protein or a protein involved in the metabolism of compounds which are necessary for cell division and cell growth to take place, such as nucleotides and amino acids) such that survival, growth and propagation under said conditions can be improved, can make it possible to increase the number and the productivity of said modifed C. glutamicum cells in large-scale cultures, and this in turn should increase the yields and/or the efficiency of production of one or more of the desired fine chemicals. Furthermore, the metabolic pathways of a cell are necessarily dependent on one another and coregulated. Changing the activity of any metabolic pathway in C. glutamicum (i.e. changing the activity of one of the proteins of the invention, which is involved in such a pathway) makes it possible to change simultaneously the activity or regulation of another metabolic pathway in this microorganism, which may be involved directly in the synthesis or degradation of a fine chemical.

[0006] The present invention provides novel nucleic acid molecules encoding proteins which are referred to here as MCP proteins and which are, for example, capable of modulating the production or the efficiency of production of one or more fine chemicals in C. glutamicum or of serving as identification markers for C. glutamicum or related organisms. Nucleic acid molecules encoding an MCP protein are referred to here as MCP nucleic acid molecules. In a preferred embodiment, the MCP protein is capable of modulating the production or the efficiency of production of one or more fine chemicals in C. glutamicum or of serving as identification markers for C. glutamicum or related organisms. Examples of such proteins are those encoded by the genes listed in Table 1.

[0007] Consequently, one aspect of the invention relates to isolated nucleic acid molecules (e.g. cDNAs) comprising a nucleotide sequence which encodes an MCP protein or biologically active sections thereof and also nucleic acid fragments which are suitable as primers or hybridization probes for detecting or amplifying MCP-encoding nucleic acid (e.g. DNA or mRNA). In particularly preferred embodiments, the isolated nucleic acid molecule comprises any of the nucleotide sequences listed in Appendix A or the coding region of any of these nucleic acid sequences or a complement thereof. In other preferred embodiments, the isolated nucleic acid molecule encodes one of the amino acid sequences listed in Appendix B. The preferred MCP proteins of the invention likewise have preferably at least one of the MCP activities described herein.

[0008] Appendix A defines hereinbelow the nucleic acid sequences of the sequence listing together with the sequence modifications at the relevant position, described in Table 1.

[0009] Appendix B defines hereinbelow the polypeptide sequences of the sequence listing together with the sequence modifications at the relevant position, described in Table 1.

[0010] In a further embodiment, the isolated nucleic acid molecule is at least 15 nucleotides in length and hybridizes under stringent conditions to a nucleic acid molecule which comprises a nucleotide sequence of Appendix A. The isolated nucleic acid molecule preferably corresponds to a naturally occurring nucleic acid molecule. The isolated nucleic acid more preferably encodes a naturally occurring C. glutamicum MCP protein or a biologically active section thereof.

[0011] Another aspect of the invention relates to vectors, for example recombinant expression vectors, which contain the nucleic acid molecules of the invention and to host cells into which said vectors have been introduced. In one embodiment, an MCP protein is prepared by using a host cell which is cultivated in a suitable medium. The MCP protein may then be isolated from the medium or the host cell.

[0012] Another aspect of the invention relates to a genetically modified microorganism into which an MCP gene has been introduced or in which an MCP gene has been modified. In one embodiment, the genome of said microorganism has been modified by introducing at least one inventive nucleic acid molecule which encodes the mutated MCP sequence as transgene. In another embodiment, an endogenous MCP gene in the genome of said microorganism has been modified, for example functionally disrupted, by homologous recombination with a modified MCP gene. In a preferred embodiment, the microorganism belongs to the genus Corynebacterium or Brevibacterium, with Corynebacterium glutamicum being particularly preferred. In a preferred embodiment, the microorganism is also used for preparing a compound of interest, such as an amino acid, particularly preferably lysine.

[0013] Another preferred embodiment are host cells having more than one of the nucleic acid molecules described in Appendix A. Such host cells can be prepared in various ways known to the skilled worker. They may be transfected, for example, by vectors carrying several of the nucleic acid molecules of the invention. However, it is also possible to use a vector for introducing in each case one nucleic acid molecule of the invention into the host cell and therefore to use a plurality of vectors either simultaneously or sequentially. Thus it is possible to construct host cells which carry numerous, up to several hundred, nucleic acid sequences of the invention. Such an accumulation can often produce superadditive effects on the host cell with respect to fine-chemical productivity.

[0014] Another aspect of the invention relates to an isolated MCP protein or to a section, for example a biologically active section, thereof. In a preferred embodiment, the isolated MCP protein or its section is capable of modulating the production or the efficiency of production of one or more fine chemicals in C. glutamicum or of serving as identification markers for C. glutamicum or related organisms. In another preferred embodiment, the isolated MCP protein or a section thereof is sufficiently homologous to an amino acid sequence of Appendix B for the protein or its section to still be capable of, for example, modulating the production or the efficiency of production of one or more fine chemicals in C. glutamicum or of serving as identification markers for C. glutamicum or related organisms.

[0015] Moreover, the invention relates to an isolated MCP-protein preparation. In preferred embodiments, the MCP protein comprises an amino acid sequence of Appendix B. In a further preferred embodiment, the invention relates to an isolated full-length protein which is essentially homologous to a complete amino acid sequence of Appendix B (which is encoded by an open reading frame in Appendix A).

[0016] The MCP polypeptide or a biologically active section thereof may be functionally linked to a non-MCP polypeptide to produce a fusion protein. In preferred embodiments, this fusion protein has a different activity from that of the MCP protein alone. In other preferred embodiments, said fusion protein is capable of modulating the yield, production and/or efficiency of production of one or more fine chemicals in C. glutamicum or of serving as identification marker for C. glutamicum or related organisms. In particularly preferred embodiments, integration of said fusion protein into a host cell modulates the production of a compound of interest by the cell.

[0017] Another aspect of the invention relates to a method for preparing a fine chemical. The method provides for the cultivation of a cell containing a vector which causes the expression of an MCP nucleic acid molecule of the invention so that a fine chemical is produced. In a preferred embodiment, this method additionally comprises the step of obtaining a cell containing such a vector, said cell being transfected with a vector which causes expression of an MCP nucleic acid. In a further preferred embodiment, said method additionally comprises the step in which the fine chemical is obtained from the culture. In a particularly preferred embodiment the cell belongs to the genus Corynebacterium or Brevibacterium.

[0018] Another aspect of the invention relates to method for modulating the production of a molecule from a microorganism. These methods comprise contacting the cell with a substance which modulates the MCP-protein activity or the expression of MCP nucleic acids such that a cell-associated activity is modified in comparison with the same activity in the absence of said substance. In a preferred embodiment, the cell is modulated with respect to one or more C. glutamicum MCP-protein activities so that the yield, production and/or efficiency of production of a fine chemical of interest by said microorganism is improved. The substance which modulates the MCP-protein activity may be a substance which stimulates MCP-protein activity or expression of MCP nucleic acids. Examples of substances stimulating said MCP-protein activity or expression of MCP nucleic acids include small molecules, active MCP proteins and nucleic acids which encode MCP proteins and have been introduced into the cell. Examples of substances which inhibit MCP activity or MCP expression include small molecules and antisense MCP nucleic acid molecules.

[0019] Another aspect of the invention relates to methods for modulating the yields, the production and/or the efficiency of production of a compound of interest from a cell, comprising introducing an MCP wild-type gene or MCP-mutant gene into a cell, which gene either remains on a separate plasmid or is integrated into the genome of the host cell. Integration into the genome may take place randomly or via homologous recombination, so that the native gene is replaced by the integrated copy leading to the production of the compound of interest from the cell to be modulated. In a preferred embodiment, said yields are increased. In another preferred embodiment, the chemical is a fine chemical and is, in a particularly preferred embodiment, an amino acid. In a particularly preferred embodiment, this amino acid is L-lysine.

### DETAILED DESCRIPTION OF THE INVENTION

[0020] The present invention provides MCP nucleic-acid and MCP-protein molecules which can be used for identifying Corynebacterium glutamicum or related organisms, for mapping the C. glutamicum genome (or the genome of a closely related organism) or for identifying microorganisms which can be used for producing fine chemicals, for example via fermentative processes. The proteins encoded by said nucleic acids may be used for directly or indirectly modulating the production or the efficiency of production of one or more fine chemicals in C. glutamicum, as identification markers for C. glutamicum or related organisms, for oxidizing terpenoids or for degrading hydrocarbons or as targets for developing therapeutic pharmaceutical compounds. The aspects of the invention are further illustrated below.

[0021] I. Fine chemicals

[0022] The term “fine chemicals” is known in the art and includes molecules which are produced by an organism and are used in various branches of industry such as, for example, but not restricted to, the pharmaceutical industry, the agricultural industry and the cosmetics industry. These compounds comprise organic acids such as tartaric acid, itaconic acid and diaminopimelic acid, both proteinogenic and nonproteinogenic amino acids, purine and pyrimidine bases, nucleosides and nucleotides (as described, for example, in Kuninaka, A. (1996) Nucleotides and related compounds, pp. 561-612, in Biotechnology Vol. 6, Rehm et al., Editors VCH: Weinheim and the references therein), lipids, saturated and unsaturated fatty acids (for example arachidonic acid), diols (e.g. propanediol and butanediol), carbohydrates (e.g. hyaluronic acid and trehalose), aromatic compounds (e.g. aromatic amines, vanillin and indigo), vitamins and cofactors (as described in Ullmann's Encyclopedia of Industrial Chemistry, Vol. A27, “Vitamins”, pp. 443-613 (1996) VCH: Weinheim and the references therein; and Ong, A. S., Niki, E. and Packer, L. (1995) “Nutrition, Lipids, Health and Disease” Proceedings of the UNESCO/Confederation of Scientific and Technological Associations in Malaysia and the Society for Free Radical Research—Asia, held Sept. 1-3, 1994, in Penang, Malaysia, AOCS Press (1995)), enzymes and all other chemicals described by Gutcho (1983) in Chemicals by Fermentation, Noyes Data Corporation, ISBN: 0818805086 and the references indicated therein. The metabolism and the uses of particular fine chemicals are further illustrated below.

[0023] A. Metabolism and Uses of Amino Acids

[0024] Amino acids comprise the fundamental structural units of all proteins and are thus essential for normal cellular functions in all organisms. The term “amino acid” is known in the art. Proteinogenic amino acids, of which there are 20 types, serve as structural units for proteins, in which they are linked together by peptide bonds, whereas the nonproteinogenic amino acids (hundreds of which are known) usually do not occur in proteins (see Ullmann's Encyclopedia of Industrial Chemistry, Vol. A2, pp. 57-97 VCH: Weinheim (1985)). Amino acids can exist in the optical D or L configuration, although L-amino acids are usually the only type found in naturally occurring proteins. Biosynthetic and degradation pathways of each of the 20 proteinogenic amino acids are well characterized both in prokaryotic and eukaryotic cells (see, for example, Stryer, L. Biochemistry, 3^{rd} edition, pp. 578-590 (1988)). The “essential” amino acids (histidine, isoleucine, leucine, lysine, methionine, phenylalanine, threonine, tryptophan and valine), so called because, owing to the complexity of their biosynthesis, they must usually be taken in with the diet, are converted by simple biosynthetic pathways into the other 11 “nonessential” amino acids (alanine, arginine, asparagine, aspartate, cysteine, glutamate, glutamine, glycine, proline, serine and tyrosine). Higher animals are able to synthesize some of these amino acids but the essential amino acids must be taken in with the food in order that normal protein synthesis takes place.

[0025] Apart from their function in protein biosynthesis, these amino acids are interesting chemicals as such, and it has been found that many have various applications in the human food, animal feed, chemicals, cosmetics, agricultural and pharmaceutical industries. Lysine is an important amino acid not only for human nutrition but also for monogastric livestock such as poultry and pigs. Glutamate is most frequently used as flavor additive (monosodium glutamate, MSG) and elsewhere in the food industry, as are aspartate, phenylalanine, glycine and cysteine. Glycine, L-methionine and tryptophan are all used in the pharmaceutical industry. Glutamine, valine, leucine, isoleucine, histidine, arginine, proline, serine and alanine are used in the pharmaceutical industry and the cosmetics industry. Threonine, tryptophan and D/L-methionine are widely used animal feed additives (Leuchtenberger, W. (1996) Amino acids—technical production and use, pp. 466-502 in Rehm et al., (editors) Biotechnology Vol. 6, Chapter 14a, VCH: Weinheim). It has been found that these amino acids are additionally suitable as precursors for synthesizing synthetic amino acids and proteins, such as N-acetylcysteine, S-carboxymethyl-L-cysteine, (S)-5-hydroxytryptophan and other substances described in Ullmann's Encyclopedia of Industrial Chemistry, Vol. A2, pp. 57-97, VCH, Weinheim, 1985.

[0026] The biosynthesis of these natural amino acids in organisms able to produce them, for example bacteria, has been well characterized (for a review of bacterial amino acid biosynthesis and its regulation, see Umbarger, H. E. (1978) Ann. Rev. Biochem. 47: 533-606). Glutamate is synthesized by reductive amination of α-ketoglutarate, an intermediate product in the citric acid cycle. Glutamine, proline and arginine are each generated successively from glutamate. The biosynthesis of serine takes place in a three-step process and starts with 3-phosphoglycerate (an intermediate product of glycolysis), and affords this amino acid after oxidation, transamination and hydrolysis steps. Cysteine and glycine are each produced from serine, specifically the former by condensation of homocysteine with serine, and the latter by transfer of the side-chain β-carbon atom to tetrahydrofolate in a reaction catalyzed by serine transhydroxymethylase. Phenylalanine and tyrosine are synthesized from the precursors of the glycolysis and pentose phosphate pathway, and erythrose 4-phosphate and phosphoenolpyruvate in a 9-step biosynthetic pathway which diverges only in the last two steps after the synthesis of prephenate. Tryptophan is likewise produced from these two starting molecules but it is synthesized by an 11-step pathway. Tyrosine can also be prepared from phenylalanine in a reaction catalyzed by phenylalanine hydroxylase. Alanine, valine and leucine are each biosynthetic products derived from pyruvate, the final product of glycolysis. Aspartate is formed from oxalacetate, an intermediate product of the citrate cycle. Asparagine, methionine, threonine and lysine are each produced by the conversion of aspartate. Isoleucine is formed from threonine. Histidine is formed from 5-phosphoribosyl 1-pyrophosphate, an activated sugar, in a complex 9-step pathway.

[0027] Amounts of amino acids exceeding those required for protein biosynthesis cannot be stored and are instead broken down so that intermediate products are provided for the principal metabolic pathways in the cell (for a review, see Stryer, L., Biochemistry, 3^{rd} edition, Chapter 21 “Amino Acid Degradation and the Urea Cycle”; pp. 495-516 (1988)). Although the cell is able to convert unwanted amino acids into the useful intermediate products of metabolism, production of amino acids is costly in terms of energy, the precursor molecules and the enzymes necessary for their synthesis. It is therefore not surprising that amino acid biosynthesis is regulated by feedback inhibition, whereby the presence of a particular amino acid slows down or completely stops its own production (for a review of the feedback mechanism in amino acid biosynthetic pathways, see Stryer, L., Biochemistry, 3^{rd} edition, Chapter 24, “Biosynthesis of Amino Acids and Heme”, pp. 575-600 (1988)). The output of a particular amino acid is therefore restricted by the amount of this amino acid in the cell.

[0028] B. Metabolism and Uses of Vitamins, Cofactors and Nutraceuticals

[0029] Vitamins, cofactors and nutraceuticals comprise another group of molecules. Higher animals have lost the ability to synthesize them and therefore have to take them in, although they are easily synthesized by other organisms such as bacteria. These molecules are either bioactive molecules per se or precursors of bioactive substances which serve as electron carriers or intermediate products in a number of metabolic pathways. Besides their. nutritional value, these compounds also have a significant industrial value as colorants, antioxidants and catalysts or other processing auxiliaries. (For a review of the structure, activity and industrial applications of these compounds, see, for example, Ullmann's Encyclopedia of Industrial Chemistry, “Vitamins”, Vol. A27, pp. 443-613, VCH: Weinheim, 1996). The term “vitamin” is known in the art and comprises nutrients which are required for normal functioning of an organism but cannot be synthesized by this organism itself. The group of vitamins may include cofactors and nutraceutical compounds. The term “cofactor” comprises nonproteinaceous compounds necessary for the appearance of a normal enzymic activity. These compounds may be organic or inorganic; the cofactor molecules of the invention are preferably organic. The term “nutraceutical” comprises food additives which are health-promoting in plants and animals, especially humans. Examples of such molecules are vitamins, antioxidants and likewise certain lipids (e.g. polyunsaturated fatty acids).

[0030] The biosynthesis of these molecules in organisms able to produce them, such as bacteria, has been comprehensively characterized (Ullmann's Encyclopedia of Industrial Chemistry, “Vitamins”, Vol. A27, pp. 443-613, VCH: Weinheim, 1996, Michal, G. (1999) Biochemical Pathways: An Atlas of Biochemistry and Molecular Biology, John Wiley & Sons; Ong, A. S., Niki, E. and Packer, L. (1995) “Nutrition, Lipids, Health and Disease” Proceedings of the UNESCO/Confederation of Scientific and Technological Associations in Malaysia and the Society for free Radical Research—Asia, held on Sep. 1-3, 1994, in Penang, Malaysia, AOCS Press, Champaign, Ill. X, 374 S).

[0031] Thiamine (vitamin B₁) is formed by chemical coupling of pyrimidine and thiazole units. Riboflavin (vitamin B₂) is synthesized from guanosine 5′-triphosphate (GTP) and ribose 5′-phosphate. Riboflavin in turn is employed for the synthesis of flavin mononucleotide (FMN) and flavin adenine dinucleotide (FAD). The family of compounds together referred to as “vitamin B₆” (for example pyridoxine, pyridoxamine, pyridoxal 5′-phosphate and the commercially used pyridoxine hydrochloride), are all derivatives of the common structural unit 5-hydroxy-6-methylpyridine. Panthothenate (pantothenic acid, R-(+)-N-(2,4-dihydroxy-3,3-dimethyl-1-oxobutyl)-β-alanine) can be prepared either by chemical synthesis or by fermentation. The last steps in pantothenate biosynthesis consist of ATP-driven condensation of β-alanine and pantoic acid. The enzymes responsible for the biosynthetic steps for the conversion into pantoic acid and into β-alanine and for the condensation to pantothenic acid are known. The metabolically active form of pantothenate is coenzyme A whose biosynthesis takes place by 5 enzymatic steps. Pantothenate, pyridoxal 5′-phosphate, cysteine and ATP are the precursors of coenzyme A. These enzymes catalyze not only the formation of pantothenate but also the production of (R)-pantoic acid, (R)-pantolactone, (R)-panthenol (provitamin B₅), pantetheine (and its derivatives) and coenzyme A.

[0032] The biosynthesis of biotin from the precursor molecule pimeloyl-CoA in microorganisms has been investigated in detail, and several of the genes involved have been identified. It has emerged that many of the corresponding proteins are involved in the Fe cluster synthesis and belong to the class of nifS proteins. Liponic acid is derived from octanonic acid and serves as coenzyme in energy metabolism where it is a constituent of the pyruvate dehydrogenase complex and of the α-ketoglutarate dehydrogenase complex. Folates are a group of substances all derived from folic acid which in turn is derived from L-glutamic acid, p-aminobenzoic acid and 6-methylpterin. The biosynthesis of folic acid and its derivatives starting from the intermediate products of the biotransformation of guanosine 5′-triphosphate (GTP), L-glutamic acid and p-aminobenzoic acid has been investigated in detail in certain microorganisms.

[0033] Corrinoids (such as the cobalamines and, in particular, vitamin B₁₂) and the porphyrins belong to a group of chemicals distinguished by a tetrapyrrole ring system. The biosynthesis of vitamin B₁₂ is so complex that it has not yet been completely characterized, but many of the enzymes and substrates involved are now known. Nicotinic acid (nicotinate) and nicotinamide are pyridine derivatives which are also referred to as “niacin”. Niacin is the precursor of the important coenzymes NAD (nicotinamide adenine dinucleotide) and NADP (nicotinamide adenine dinucleotide phosphate) and their reduced forms.

[0034] Production of these compounds on the industrial scale is mostly based on cell-free chemical syntheses, although some of these chemicals, such as riboflavin, vitamin B₆, pantothenate and biotin have likewise been produced by large-scale cultivation of microorganisms only vitamin B₁₂ is, because of the complexity of its synthesis, produced only by fermentation. In vitro processes require a considerable expenditure of materials and time and frequently high costs.

[0035] C. Purine, Pyrimidine, Nucleoside and Nucleotide Metabolism and Uses

[0036] Genes for purine and pyrimidine metabolism and their corresponding proteins are important aims for the therapy of oncoses and viral infections. The term “purine” or “pyrimidine” comprises nitrogen-containing bases which form part of nucleic acids, coenzymes and nucleotides. The term “nucleotide” encompasses the fundamental structural units of nucleic acid molecules, which comprise a nitrogen-containing base, a pentose sugar (the sugar is ribose in the case of RNA and the sugar is D-deoxyribose in the case of DNA) and phosphoric acid. The term “nucleoside” comprises molecules which serve as precursors of nucleotides but have, in contrast to the nucleotides, no phosphoric acid unit. It is possible to inhibit RNA and DNA synthesis by inhibiting the biosynthesis of these molecules or their mobilization to form nucleic acid molecules; targeted inhibition of this activity in cancer cells allows the ability of tumor cells to divide and replicate to be inhibited. There are also nucleotides which do not form nucleic acid molecules but serve as energy stores (i.e. AMP) or as coenzymes (i.e. FAD and NAD).

[0037] Several publications have described the use of these chemicals for these medical indications, the purine and/or pyrimidine etabolism being influenced (for example Christopherson, R. I. and Lyons, S. D. (1990) “Potent inhibitors of de novo pyrimidine and purine biosynthesis as chemotherapeutic agents”, Med. Res. Reviews 10: 505-548). Investigations of enzymes involved in purine and pyrimidine metabolism have concentrated on the development of novel medicaments which can be used, for example, as immunosuppressants or antiproliferative agents (Smith, J. L. “Enzymes in Nucleotide Synthesis” Curr. Opin. Struct. Biol. 5 (1995) 752-757; Biochem. Soc. Transact. 23 (1995) 877-902). However, purine and pyrimidine bases, nucleosides and nucleotides also have other possible uses: as intermediate products in the biosynthesis of various fine chemicals (e.g. thiamine, S-adenosylmethionine, folates or riboflavin), as energy carriers for the cell (for example ATP or GTP) and for chemicals themselves which are ordinarily used as flavor enhancers (for example IMP or GMP) or for many medical applications (see, for example, Kuninaka, A., (1996) “Nucleotides and Related Compounds in Biotechnology” Vol. 6, Rehm et al., editors VCH: Weinheim, pp. 561-612). Enzymes involved in purine, pyrimidine, nucleoside or nucleotide metabolism are also increasingly serving as targets against which chemicals are being developed for crop protection, including fungicides, herbicides and insecticides.

[0038] The metabolism of these compounds in bacteria has been characterized (for reviews, see, for example, Zalkin, H. and Dixon, J. E. (1992) “De novo purin nucleotide biosynthesis” in Progress in Nucleic Acids Research and Molecular Biology, Vol. 42, Academic Press, pp. 259-287; and Michal, G. (1999) “Nucleotides and Nucleosides”; Chapter 8 in : Biochemical Pathways: An Atlas of Biochemistry and Molecular Biology, Wiley, N.Y.). Purine metabolism, the object of intensive research, is essential for normal functioning of the cell. Disordered purine metabolism in higher animals may cause severe illnesses, for example gout. Purine nucleotides are synthesized from ribose 5-phosphate by a number of steps via the intermediate compound inosine 5′-phosphate (IMP), leading to the production of guanosine 5′-monophosphate (GMP) or adenosine 5′-monophosphate (AMP), from which the triphosphate forms used as nucleotides can easily be prepared. These compounds are also used as energy stores, so that breakdown thereof provides energy for many different biochemical processes in the cell. Pyrimidine biosynthesis takes place via formation of uridine 5′-monophosphate (UMP) from ribose 5-phosphate. UMP in turn is converted into cytidine 5′-triphosphate (CTP). The deoxy forms of all nucleotides are prepared in a one-step reduction reaction from the diphosphate ribose form of the nucleotide to give the diphosphate deoxyribose form of the nucleotide. After phosphorylation, these molecules can take part in DNA synthesis.

[0039] D. Trehalose Metabolism and Uses

[0040] Trehalose consists of two glucose molecules linked together by an α,α-1,1 linkage. It is ordinarily used in the food industry as sweetener, as additive for dried or frozen foods and in beverages. However, it is also used in the pharmaceutical industry or in the cosmetics industry and biotechnology industry (see, for example, Nishimoto et al., (1998) U.S. Pat. No. 5,759,610; Singer, M. A. and Lindquist, S. Trends Biotech. 16 (1998) 460-467; Paiva, C. L. A. and Panek, A. D. Biotech Ann. Rev. 2 (1996) 293-314; and Shiosaka, M. J. Japan 172 (1997) 97-102). Trehalose is produced by enzymes of many microorganisms and is naturally released into the surrounding medium from which it can be isolated by methods known in the art.

[0041] II. Elements and Methods of the Invention

[0042] The present invention is based, at least partially, on the detection of new molecules which are referred to herein as MCP nucleic-acid molecules. These MCP nucleic-acid molecules are suitable not only for identifying C. glutamicum or related bacterial species but also as markers for mapping the C. glutamicum genome and for identifying the bacteria which are suitable for producing fine chemicals, for example via fermentative processes. The present invention is also based, at least partially, on the MCP-protein molecules which are encoded by said MCP nucleic-acid molecules. These MCP molecules are capable of modulating the yield, production and/or efficiency of production of one or more fine chemicals in C. glutamicum, of serving as identification markers for C. glutamicum or related organisms, of degrading hydrocarbons and of serving as targets for developing therapeutic pharmaceutical compounds. In one embodiment, the MCP molecules of the invention are involved directly or indirectly in the metabolic pathway of one or more fine chemicals in C. glutamicum. In a preferred embodiment, the action of the MCP molecules of the invention of being involved indirectly or directly in such metabolic pathways has an effect on the production of a fine chemical of interest by said microorganism. In a particularly preferred embodiment, the activity of the MCP molecules of the invention is modulated such that the C. glutamicum metabolic pathways in which the MCP proteins of the invention are involved are modulated with respect to the efficiency or the output, and this modulates directly or indirectly the production or the efficiency of production of a fine chemical of interest by C. glutamicum.

[0043] The term “MCP protein” or “MCP polypeptide” comprises proteins which can modulate the yield, production and/or efficiency of production of one or more fine chemicals in C. glutamicum, degrade hydrocarbons, oxidize terpenoids and serve as target protein for drug screening or drug design or as identification markers for C. glutamicum or related organisms. Examples of MCP proteins comprise those which are encoded by the MCP genes listed in Table 1 and Appendix A. The terms “MCP gene” and “MCP nucleic acid sequence” comprise nucleic acid sequences encoding an MCP protein which comprises a coding region and corresponding untranslated 5′ and 3′ sequence regions. Examples of MCP genes are those listed in Table 1. The terms “production” and “productivity” are known in the art and include concentration of the fermentation product (for example the fine chemical of interest) which is produced within a predetermined time interval and a predetermined fermentation volume (e.g. kg of product per h per 1). The term “efficiency of production” comprises the time required for attaining a particular production quantity (for example, the time required by the cell for reaching a particular throughput rate of a fine chemical). The term “yield” or “product/carbon yield” is known in the art and comprises the efficiency of converting the carbon source into the product (i.e. the fine chemical). This is, for example, usually expressed as kg of product per kg of carbon source. Increasing the yield or production of the compound increases the amount of the molecules obtained or of the suitable obtained molecules of this compound in a particular amount of culture over a predetermined period of time. The terms “biosynthesis” and “biosynthetic pathway” are known in the art and comprise the synthesis of a compound, preferably an organic compound from intermediates by a cell, for example in a multistep process or highly regulated process. The terms “degradation” and “degradation pathway” are known in the art and comprise cleavage of a compound, preferably an organic compound, into degradation products (in more general terms: smaller or less complex molecules) by a cell, for example in a multistep process or highly regulated process. The term “metabolism” is known in the art and comprises the entirety of biochemical reactions which take place in an organism. The metabolism of a particular compound (e.g. the metabolism of an amino acid such as glycine) then comprises all biosynthetic, modification and degradation pathways in the cell, which are related to this compound.

[0044] In another embodiment, the MCP molecules of the invention are capable of modulating directly or indirectly the production of a molecule of interest, such as a fine chemical, in a microorganism such as C. glutamicum. Using gene recombination technique it is possible to manipulate one or more MCP proteins of the invention such that their function is modulated. This modulation of the function may lead to the modulation of the yield, production and/or efficiency of production of one or more fine chemicals from C. glutamicum.

[0045] For example, it is possible, by modifying the activity of a protein which is involved in the biosynthesis or degradation of a fine chemical (i.e. by mutagenesis of the corresponding gene), to directly modulate the ability of the cell to synthesize or degrade said compound, thereby modulating the yield and/or the efficiency of production of the fine chemical. Likewise it is possible, by modulating the activity of a protein which regulates a fine-chemical metabolic pathway, to influence directly, whether the production of the desired compound is up or down regulated, both of which modulate the yield or efficiency of production of the fine chemical from the cell.

[0046] The indirect modulation of the production of fine chemicals may also be carried out by modifying the activity of a protein of the invention (i.e. by mutagenesis of the corresponding gene) so that the ability of the cell to grow and to divide or to remain viable or productive is increased overall. The production of fine chemicals from C. glutamicum is usually achieved by large-scale fermentative culturing of said microorganisms conditions which are frequently suboptimal for growth and cell division. Modifying a protein of the invention (e.g. a stress reaction protein, a cell wall protein or proteins which are involved in the metabolism of compounds which are necessary for cell division and cell growth to take place, such as nucleotides and amino acids) such that survival, growth and propagation under said conditions can be improved, can make it possible to increase the number and the productivity of said modified C. glutamicum cells in large-scale cultures, and this in turn should increase the yields and/or the efficiency of production of one or more of the desired fine chemicals. Furthermore, the metabolic pathways of a cell are necessarily dependent on one another and coregulated. Changing the activity of any metabolic pathway in C. glutamicum (i.e. changing the activity of one of the proteins of the invention, which is involved in such a pathway) makes it possible to change simultaneously the activity or regulation of another metabolic pathway in this microorganism, which may be involved directly in the synthesis or degradation of a fine chemical.

[0047] The isolated nucleic acid sequences of the invention are located in the genome of a Corynebacterium glutamicum strain which can be obtained from the American Type Culture Collection under the name ATCC 13032. The nucleotide sequence of the isolated C. glutamicum MCP nucleic-acid molecules and the predicted amino acid sequences of the C. glutamicum MCP proteins are shown in Appendix A and Appendix B, respectively. Computer analyses were carried out which classified and/or identified many of these nucleotide sequences as sequences with homologies to E. coli or Bacillus subtilis genes.

[0048] The present invention also relates to proteins whose amino acid sequence is essentially homologous to an amino acid sequence in Appendix B. As used herein, a protein whose amino acid sequence is essentially homologous to a selected amino acid sequence is at least about 50% homologous to the selected amino acid sequence, for example to the entire selected amino acid sequence. A protein whose amino acid sequence is essentially homologous to a selected amino acid sequence may also be at least about 50-60%, preferably at least about 60-70%, more preferably at least about 70-80%, 80-90% or 90-95% and most preferably at least about 96%, 97%, 98%, 99% or even more homologous to the selected amino acid sequence.

[0049] An MCP protein of the invention or a biologically active section or fragment thereof is capable of modulating the yield, production and/or efficiency of production of one or more fine chemicals in C. glutamicum, of degrading hydrocarbons, or oxidizing terpenoids, of serving as target for drug development or of serving as identification marker for C. glutamicum or related organisms.

[0050] The following subsections describe various aspects of the invention in more detail:

[0051] A. Isolated Nucleic Acid Molecules

[0052] One aspect of the invention relates to isolated nucleic acid molecules which encode MCP molecules or biologically active sections thereof and also to nucleic acid fragments which are sufficient for the use as hybridization probes or primers for identifying or amplifying MCP-encoding nucleic acids (e.g. MCP DNA). These nucleic acid molecules may be used for identifying C. glutamicum or related organisms, for mapping the genome of C. glutamicum or related organisms or for identifying microorganisms which are suitable for producing fine chemicals, for example via fermentative processes. The term “nucleic acid molecule”, as used herein, is intended to comprise DNA molecules (e.g. cDNA or genomic DNA) and RNA molecules (e.g. mRNA) and also DNA or RNA analogs generated by means of nucleotide analogs.

[0053] Moreover, this term comprises the untranslated sequence located at the 3′ and 5′ ends of the coding gene region: at least about 100 nucleotides of the sequence upstream of the 5′ end of the coding region and at least about 20 nucleotides of the sequence downstream of the 3′ end of the coding gene region. The nucleic acid molecule may be single-stranded or double-stranded but is preferably double-stranded DNA. An “isolated” nucleic acid molecule is removed from other nucleic acid molecules which are present in the natural source of the nucleic acid. An “isolated” nucleic acid preferably does not have any sequences which flank the nucleic acid naturally in the genomic DNA of the organism from which the nucleic acid originates (for example, sequences located at the 5′ or 3′ end of the nucleic acid). In various embodiments, the isolated MCP nucleic acid molecule may have, for example, less than about 5 kb, 4 kb, 3 kb, 2 kb, 1 kb, 0.5 kb or 0.1 kb of the nucleotide sequences which naturally flank the nucleic acid molecule in the genomic DNA of the cell from which the nucleic acid originates (e.g. a C. glutamicum cell). In addition to this, an “isolated” nucleic acid molecule such as a cDNA molecule may essentially be free of other cellular material or culture medium, if prepared by recombinant techniques, or free of chemical precursors or other chemicals, if chemically synthesized.

[0054] A nucleic acid molecule of the invention, for example a nucleic acid molecule having a nucleotide sequence of Appendix A or a section thereof, may be isolated by means of molecular biological standard techniques and by the sequence information provided herein. For example, a C. glutamicum MCP cDNA may be isolated from a C. glutamicum bank by using a complete sequence from Appendix A or a section thereof as hybridization probe and by using standard hybridization techniques (as described, for example, in Sambrook, J., Fritsch, E. F. and Maniatis, T. Molecular Cloning: A Laboratory Manual. 2nd Ed., Cold Spring Harbor Laboratory, Cold Spring Harbor Laboratory Press, Cold Spring Harbor, N.Y., 1989). Moreover, a nucleic acid molecule comprising a complete sequence from Appendix A or a section thereof can be isolated via polymerase chain reaction, using the oligonucleotide primers produced on the basis of said sequence (for example, it is possible to isolate a nucleic acid molecule comprising a complete sequence from Appendix A or a section thereof via polymerase chain reactions by using oligonucleotide primers which have been produced on the basis of this same sequence from Appendix A). For example, mRNA can be isolated from normal endothelial cells (for example via the guanidinium-thiocyanate extraction method of Chirgwin et al. (1979) Biochemistry 18:5294-5299), and the cDNA can be prepared by means of reverse transcriptase (e.g. Moloney-MLV Reverse Transcriptase, available from Gibco/BRL, Bethesda, Md., or AMV Reverse Transcriptase, available from Seikagaku America, Inc., St. Petersburg, Fla.) and by means of random polynucleotide primers or oligonucleotide primers on the basis of any of the nucleotide sequences shown in Appendix A. Synthetic oligonucleotide primers for amplification via polymerase chain reaction can be produced on the basis of any of the nucleotide sequences shown in Appendix A. A nucleic acid of the invention may be amplified by means of cDNA or, alternatively, genomic DNA as template and suitable oligonucleotide primers according PCR standard amplification techniques. The nucleic acid amplified in this way may be cloned into a suitable vector and characterized by DNA sequence analysis. Oligonucleotides corresponding to an MCP nucleotide sequence may also be prepared by standard syntheses using, for example, an automatic DNA synthesizer.

[0055] In a preferred embodiment, an isolated nucleic acid molecule of the invention comprises any of the nucleotide sequences listed in Appendix A. The sequences of Appendix A correspond to the inventive MCP cDNAs from Corynebacterium glutamicum. These cDNAs comprise sequences, the MCP proteins (i.e. the “coding region” which is indicated in each sequence in Appendix A), and also the 5′ and 3′ untranslated sequences which are likewise indicated in Appendix A. As an alternative, the nucleic acid molecule may comprise only the coding region of any of the sequences in Appendix A.

[0056] In addition to this, the nucleic acid molecule of the invention may comprise only one section of the coding region of any of the sequences in Appendix A, for example a fragment can be used as probe or primer or fragment which encodes a biologically active section of an MCP protein. The nucleotide sequences determined from cloning the C. glutamicum MCP genes make it possible to generate probes and primers which are designed for identifying and/or cloning MCP homologs in other cell types and organisms and MCP homologs of other Corynebacteria or related species. The probe or the primer usually comprises essentially purified oligonucleotide. The oligonucleotide usually comprises a nucleotide sequence region which hybridizes under stringent conditions to at least about 12, preferably about 25, more preferably about 40, 50 or 75 successive nucleotides of a sense strand of any of the sequences indicated in Appendix A, of an antisense strand of any of the sequences indicated in Appendix A or naturally occurring mutants thereof. Primers on the basis of a nucleotide sequence of Appendix A may be used in PCR reactions for cloning MCP homologs. Probes on the basis of the MCP nucleotide sequences may be used for detecting transcripts or genomic sequenes which encode the same or homologous proteins. In preferred embodiments, the probe moreover comprises a labeling group bound thereto, for example a radioisotope, a fluorescent compound, an enzyme or an enzyme cofactor. These probes may be used as part of a diagnostic assay kit for identifying cells with faulty expression of an MCP protein, for example by measuring a quantity of an MCP-encoding nucleic acid in a cell sample, for example by detecting the MCP mRNA level or by determining whether a genomic MCP gene has been mutated or deleted.

[0057] In one embodiment, the nucleic acid molecule of the invention encodes a protein or a section thereof comprising an amino acid sequence which is sufficiently homologous to an amino acid sequence of Appendix B that the protein or a section thereof retains the ability to modulate the yield, production and/or efficiency of production of one or more fine chemicals in C. glutamicum, to degrade hydrocarbons, to oxidize terpenoids, to serve as target for drug development or to serve as identification marker for C. glutamicum or related organisms. The term “sufficiently homologous”, as used herein, relates to proteins or sections thereof whose amino acid sequences have a minimum number of identical or equivalent (for example an amino acid residue having a side chain similar to that of an amino acid residue in any of the sequences of Appendix B) amino acid residues, compared to an amino acid sequence of Appendix B, such that the protein or a section thereof is capable of modulating the yield, production and/or efficiency of production of one or more fine chemicals in C. glutamicum, of degrading hydrocarbons, of oxidizing terpenoids, of serving as target for drug development or of serving as identification marker for C. glutamicum or related organisms. Examples of these activities are likewise described herein. Thus, the “function of an MCP protein” contributes to the overall regulation of the metabolic pathway of one or more fine chemicals or to the degradation of a hydrocarbon or to the oxidation of a terpenoid.

[0058] Sections of proteins encoded by the MCP nucleic acid molecules of the invention are preferably biologically active sections of any of the MCP proteins. The term “biologically active section of an MCP protein”, as used herein, is intended to comprise a section, for example a domain or a motif of an MCP protein, which/ which modulates the yield, production and/or efficiency of production of one or more fine chemicals in C. glutamicum, degrades hydrocarbons, oxidizes terpenoids and serves as a target for drug development or as an identification marker for C. glutamicum or related organisms. In order to determine whether an MCP protein or a biologically active section thereof is able to modulate the yield, production and efficiency of production of one or more fine chemicals in C. glutamicum, to degrade hydrocarbons or to oxidize terpenoids, an enzyme activity assay may be carried out. These assay methods, as described in detail in Example 8 of the examples, are familiar to the skilled worker.

[0059] Additional nucleic acid fragments encoding biologically active sections of an MCP protein can be prepared by isolating a section of any of the sequences in Appendix B, expressing the encoded section of the MCP protein or MCP peptide (for example by recombinant expression in vitro) and determining the activity of the encoded section of the MCP protein or MCP peptide.

[0060] Moreover, the invention comprises nucleic acid molecules which differ from any of the nucleotide sequences shown in Appendix A (and sections thereof) due to the degeneracy of the genetic code and thus encode the same MCP protein as the one encoded by the nucleotide sequences shown in Appendix A. In another embodiment, an isolated nucleic acid molecule of the invention has a nucleotide sequence which encodes a protein having an amino acid sequence shown in Appendix B. In a further embodiment, the nucleic acid molecule of the invention encodes a full-length C. glutamicum protein which is essentially homologous to an amino acid sequence of Appendix B (encoded by an open reading frame shown in Appendix A).

[0061] In addition to naturally occurring MCP-sequence variants which may exist in the population the skilled worker likewise understands that changes can be introduced into a nucleotide sequence of Appendix A via mutation, leading to a change in the amino acid sequence of the encoded MCP protein, without impairing the functionality of the MCP protein. Thus it is possible, for example, to prepare in a sequence of Appendix A nucleotide substitutions which lead to amino acid substitutions at “nonessential” amino acid residues. A “nonessential” amino acid residue is a residue which can be altered in the wild-type sequence of any of the MCP proteins (Appendix B) without modifying the activity of said MCP protein, whereas an “essential” amino acid residue is required for MCP-protein activity. However, other amino acid residues (for example nonconserved or merely semiconserved amino acid residues in the domain with MCP activity) may be nonessential for activity and can therefore probably be modified without modifying the MCP activity.

[0062] Consequently, another aspect of the invention relates to nucleic acid molecules encoding MCP proteins which contain modified amino acid residues which are nonessential for MCP activity. The amino acid sequence of these MCP proteins differs from a sequence in Appendix B but the proteins nevertheless retain at least one of the MCP activities described herein. In one embodiment, the isolated nucleic acid molecule comprises a nucleotide sequence encoding a protein which comprises an amino acid sequence having at least about 50% homology to an amino acid sequence of Appendix B and which is capable of modulating the yield, production and/or efficiency of production of one or more fine chemicals in C. glutamicum, of degrading hydrocarbons, of oxidizing terpenoids, of serving as a target for drug development or of serving as an identification marker for C. glutamicum or related organisms.

[0063] An isolated nucleic acid molecule encoding an MCP protein which is homologous to a protein sequence of Appendix B may be generated by introducing one or more nucleotide substitutions, additions or deletions into a nucleotide sequence of Appendix A so that one or more amino acid substitutions, additions or deletions are introduced into the encoded protein. The mutations may be introduced into any of the sequences of Appendix A by standard techniques such as site-directed mutagenesis and PCR-mediated mutagenesis. Preference is given to introducing conservative amino acid substitutions at one or more of the predicted nonessential amino acid residues. A “conservative amino acid substitution” replaces the amino acid residue by an amino acid residue with a similar side chain. Families of amino acid residues with similar side chains have been defined in the art. These families comprise amino acids with basic side chains (e.g. lysine, arginine, histidine), acidic side chains (e.g. aspartic acid, glutamic acid), uncharged polar side chains (e.g. glycine, aspargine, glutamine, serine, threonine, tyrosine, cysteine), nonpolar side chains (e.g. alanine, valine, leucine, isoleucine, proline, phenylalanine, methionine, tryptophan), beta-branched side chains (e.g. threonine, valine, isoleucine) and aromatic side chains (e.g. tyrosine, phenylalanine, tryptophan, histidine). A predicted nonessential amino acid residue in an MCP protein is thus preferably replaced by another amino acid residue of the same side-chain family. In another embodiment, the mutations may alternatively be introduced randomly over the entire or over part of the MCP-encoding sequence, for example by saturation mutagenesis, and the resultant mutants may be tested for an MCP activity described herein, in order to identify mutants maintaining MCP activity. After mutagenesis of any of the sequences of Appendix A, the encoded protein may be expressed recombinantly, and the activity of said protein may be determined using, for example, the assays described herein (see Example 8 of the examples).

[0064] B. Recombinant Expression Vectors and Host Cells

[0065] Another aspect of the invention relates to vectors, preferably expression vectors, containing a nucleic acid which encodes an MCP protein (or a section thereof). The term “vector”, as used herein, relates to a nucleic acid molecule capable of transporting another nucleic acid to which it is bound. One type of vector is a “plasmid” which term means a circular double-stranded DNA loop into which additional DNA segments can be ligated. Another type of vector is a viral vector, and here additional DNA segments can be ligated into the viral genome. Certain vectors are capable of replicating autonomously in a host cell into which they have been introduced (for example, bacterial vectors with bacterial origin of replication and episomal mammalian vectors). Other vectors (e.g. nonepisomal mammalian vectors) are integrated into the genome of a host cell when introduced into said host cell and thereby replicated together with the host genome. Moreover, particular vectors are capable of controlling the expression of genes to which they are functionally linked. These vectors are referred to here as “expression vectors”. Normally, expression vectors used in DNA recombination techniques are in the form of plasmids. In the present description, “plasmids” and “vectors” may be used interchangeably, since the plasmid is the most commonly used type of vector. However, the present invention is intended to comprise other types of expression vectors such as viral vectors (for example replication-deficient retroviruses, adenoviruses and adenovirus-related viruses), which exert similar functions.

[0066] The recombinant expression vectors of the invention comprise a nucleic acid of the invention in a form which is suitable for expressing said nucleic acid in a host cell, meaning that the recombinant expression vectors comprise one or more regulatory sequences which are selected on the basis of the host cells to be used for expression and which are functionally linked to the nucleic acid sequence to be expressed. In a recombinant expression vector the term “functionally linked” means that the nucleotide sequence of interest is bound to the regulatory sequence(s) such that expression of said nucleotide sequence is possible (for example in an in vitro transcription/translation system or in a host cell, if the vector has been introduced into said host cell). The term “regulatory sequence” is intended to comprise promoters, repressor-binding sites, activator-binding sites, enhancer regions and other expression control elements (e.g. terminators, other elements of the m-RNA secondary structure or polyadenylation signals). These regulatory sequences are described, for example in Goeddel: Gene Expression Technology: Methods in Enzymology 185, Academic Press, San Diego, Calif. (1990). Regulatory sequences comprise those which control the constitutive expression of a nucleotide sequence in many types of host cells and those which control expression of the nucleotide sequence only in particular host cells. The skilled worker understands that designing an expression vector may depend on factors such as the choice of host cell to be transformed, the desired extent of protein expression, etc. The expression vectors of the invention may be introduced into the host cells such as to prepare proteins or peptides, including the fusion proteins or fusion peptides which are encoded by the nucleic acids as described herein (e.g. MCP proteins, mutated forms of MCP proteins, fusion proteins, etc.).

[0067] The recombinant expression vectors of the invention may be designed for expressing MCP proteins in prokaryotic or eukaryotic cells. For example, MCP genes may be expressed in bacterial cells such as C. glutamicum, insect cells (using Baculovirus expression vectors), yeast cells and other fungal cells (see Romanos, M. A. et al. (1992) “Foreign gene expression in yeast: a review”, Yeast 8: 423-488; van den Hondel, C. A. M. J. J. et al. (1991) “Heterologous gene expression in filamentous fungi” in: More Gene Manipulations in Fungi, J. W. Bennet & L. L. Lasure, Editors, pp. 396-428: Academic Press: San Diego; und van den Hondel, C. A. M. J. J. & Punt, P. J. (1991) “Gene transfer systems and vector development for filamentous fungi” in: Applied Molecular Genetics of Fungi, Peberdy, J. F. et al., Editors, pp. 1-28, Cambridge University Press: Cambridge), algal and multicellular plant cells (see Schmidt, R. and Willmitzer, L. (1988) “High efficiency Agrobacterium tumefaciens-mediated transformation of Arabidopsis thaliana leaf and cotyledon explants” Plant Cell Rep.: 583-586) or mammalian cells. Suitable host cells are discussed further in Goeddel, Gene Expression Technology: Methods in Enzymology 185, Academic Press, San Diego, Calif. (1990). Alternatively, the recombinant expression vector may be transcribed and translated in vitro, for example by using T7 promoter regulatory sequences and T7 polymerase.

[0068] Proteins are expressed in prokaryotes mainly by using vectors containing constitutive or inducible promoters which control the expression of fusion or nonfusion proteins. Fusion vectors contribute a number of amino acids to a protein encoded therein, usually at the amino terminus of the recombinant protein. These fusion vectors usually have three tasks: 1) enhancing the expression of recombinant protein; 2) increasing the solubility of the recombinant protein; and 3) supporting the purification of the recombinant protein by acting as a ligand in affinity purification. Often a proteolytic cleavage site is introduced into fusion expression vectors at the junction of fusion unit and recombinant protein so that the recombinant protein can be separated from the fusion unit after purifying the fusion protein. These enzymes and their corresponding recognition sequences comprise factor Xa, thrombin and enterokinase.

[0069] Common fusion expression vectors comprise pGEX (Pharmacia Biotech Inc; Smith, D. B. and Johnson, K. S. (1988) Gene 67:31-40), pMAL (New England Biolabs, Beverly, Mass.) and pRIT 5 (Pharmacia, Piscataway, N.J.), in which glutathione S-transferase (GST), maltose E-binding protein and protein A, respectively, are fused to the recombinant target protein. In one embodiment, the MCP protein-encoding sequence is cloned into a pGEX expression vector such that a vector is generated which encodes a fusion protein comprising, from N terminus to C terminus: GST—thrombin cleavage site—protein X. The fusion protein may be purified via affinity chromatography by means of a glutathione-agarose resin. The recombinant MCP protein which is not fused to GST may be obtained by cleaving the fusion protein with thrombin.

[0070] Examples of suitable inducible nonfusion E. coli expression vectors include pTrc (Amann et al., (1988) Gene 69:301-315) and pET 11d (Studier et al. Gene Expression Technology: Methods in Enzymology 185, Academic Press, San Diego, Calif. (1990) 60-89). Target-gene expression from the pTrc vector is based on transcription from a hybrid trip-lac fusion promoter by host RNA polymerase. Target-gene expression from the pET 11d vector is based on transcription from a T7-gn10-lac fusion promoter, which is mediated by a coexpressed viral RNA polymerase (T7 gn1). This viral polymerase is provided in the BL 21 (DE3) or HMS174 (DE3) host strain by a resident λ prophage which harbors a T7 gnl gene under the transcriptional control of the lacUV 5 promoter.

[0071] One strategy for maximizing expression of the recombinant protein is to express said protein in a host bacterium whose ability to proteolytically cleave said recombinant protein is disrupted (Gottesman, S. Gene Expression Technology: Methods in Enzymology 185, Academic Press, San Diego, Calif. (1990) 119-128). Another strategy is to modify the nucleic acid sequence of the nucleic acid to be inserted into an expression vector such that the individual codons for each amino acid are those which are preferably used in a bacterium selected for expression, such as C. glutamicum (Wada et al. (1992) Nucleic Acids Res. 20:2111-2118). This modification of the nucleic acid sequences of the invention can be carried out by standard techniques of DNA synthesis.

[0072] In a further embodiment, the MCP-protein expression vector is a yeast expression vector. Examples of vectors for expression in the yeast S. cerevisiae include pYepSec1 (Baldari et al., (1987) Embo J. 6:229-234), pMFa (Kurjan and Herskowitz (1982) Cell 30:933-943), pJRY88 (Schultz et al. (1987) Gene 54:113-123) and pYES2 (Invitrogen Corporation, San Diego, Calif.). Vectors and methods for constructing vectors which are suitable for use in other fungi such as filamentous fungi include those which are described in detail in: van den Hondel, C. A. M. J. J. & Punt, P. J. (1991) “Gene transfer systems and vector development for filamentous fungi, in: Applied Molecular Genetics of Fungi, J. F. Peberdy et al., Editors, pp. 1-28, Cambridge University Press: Cambridge.

[0073] As an alternative, it is possible to express the MCP proteins of the invention in insect cells using Baculovirus expression vectors. Baculovirus vectors available for the expression of proteins in cultured insect cells (e.g. Sf9 cells) include the pAc series (Smith et al., (1983) Mol. Cell Biol. 3:2156-2165) and the pVL series (Lucklow and Summers (1989) Virology 170:31-39).

[0074] In a further embodiment, the MCP proteins of the invention may be expressed in unicellular plant cells (such as algae) or in cells of higher plants (e.g. spermatophytes such as crops). Examples of plant expression vectors include those which are described in detail in Becker, D., Kemper, E., Schell, J. and Masterson, R. (1992) “New plant binary vectors with selectable markers located proximal to the left border”, Plant Mol. Biol. 20:1195-1197; and Bevan, M. W. (1984) “Binary Agrobacterium vectors for plant transformation”, Nucl. Acids Res. 12:8711-8721.

[0075] In another embodiment, a nucleic acid of the invention is expressed in mammalian cells using a mammalian expression vector. Examples of mammalian expression vectors include pCDM8 (Seed, B. (1987) Nature 329:840) and pMT2PC (Kaufman et al. (1987) EMBO J. 6:187-195). When used in mammalian cells, the control functions of the expression vector are often provided by viral regulatory elements. Commonly used promoters are derived, for example, from polyoma, adenovirus 2, cytomegalovirus and simian virus 40. Other suitable expression systems for prokaryotic and eukaryotic cells can be found in Chapters 16 and 17 of Sambrook, J., Fritsch, E. F. and Maniatis, T., Molecular cloning: A Laboratory Manual, 2^{nd} Edition, Cold Spring Harbor Laboratory, Cold Spring Harbor Laboratory Press, Cold Spring Harbor, N.Y., 1989.

[0076] In a further embodiment, the recombinant mammalian expression vector may cause expression of the nucleic acid preferably in a particular cell type (for example, tissue-specific regulatory elements are used for expressing the nucleic acid). Tissue-specific regulatory elements are known in the art. Nonlimiting examples of suitable tissue-specific promoters include the albumin promoter (liver-specific; Pinkert et al. (1987) Genes Dev. 1:268-277), lymphoid-specific promoters (Calame and Eaton (1988) Adv. Immunol. 43:235-275), in particular promoters of T-cell receptors (Winoto and Baltimore (1989) EMBO J. 8:729-733) and immunoglobulins (Banerji et al. (1983) Cell 33:729-740; Queen and Baltimore (1983) Cell 33:741-748), neuron-specific promoters (e.g. neurofilament promoter; Byrne and Ruddle (1989) PNAS 86:5473-5477), pancreas-specific promoters (Edlund et al., (1985) Science 230:912-916) and mamma-specific promoters (e.g. milk serum promoter; U.S. Pat. No. 4,873,316 and European patent application document No. 264 166). Development-regulated promoters, for example the murine hox promoters (Kessel and Gruss (1990) Science 249:374-379) and the α-fetoprotein promoter (Campes and Tilghman (1989) Genes Dev. 3:537-546), are likewise included.

[0077] Moreover, the invention provides a recombinant expression vector comprising an inventive DNA molecule which has been cloned into the expression vector in antisense direction. This means that the DNA molecule is functionally linked to a regulatory sequence such that an RNA molecule which is antisense to MCP mRNA can be expressed (via transcription of the DNA molecule). It is possible to select regulatory sequenes which are functionally bound to a nucleic acid cloned in antisense direction and which control the continuous expression of the antisense RNA molecule in a multiplicity of cell types; for example, it is possible to select viral promoters and/or enhancers or regulatory sequences which control the constitutive tissue-specific or cell type-specific expression of antisense RNA. The antisense expression vector may be in the form of a recombinant plasmid, phagemid or attenuated virus, which produces antisense nucleic acids under the control of a highly effective regulatory region whose activity is determined by the cell type into which the vector is introduced. The regulation of gene expression by means of antisense genes is discussed in Weintraub, H. et al., Antisense-RNA as a molecular tool for genetic analysis, Reviews—Trends in Genetics, Vol. 1(1) 1986.

[0078] Another aspect of the invention relates to the host cells into which a recombinant expression vector of the invention has been introduced. The terms “host cell” and “recombinant host cell” are used interchangeably herein. Naturally, these terms relate not only to a particular target cell but also the progeny or potential progeny of this cell. Since particular modifications may appear in successive generations, due to mutation or environmental factors, this progeny is not necessarily identical to the parental cell but is still included in the scope of the term as used herein.

[0079] A host cell may be a prokaryotic or eukaryotic cell. For example, an MCP protein may be expressed in bacterial cells such as C. glutamicum, insect cells, yeast or mammalian cells (such as Chinese hamster ovary (CHO) cells or COS cells). Other suitable host cells are familiar to the skilled worker. Microorganisms which are related to Corynebacterium glutamicum and can be used in a suitable manner as host cells for the nucleic acid molecules and protein molecules of the invention are listed in Table 3.

[0080] Conventional transformation or transfection methods can be used to introduce vector DNA into prokaryotic or eukaryotic cells. The terms “transformation” and “transfection”, “conjugation” and “transduction”, as used herein, are intended to comprise a multiplicity of methods known in the art for introducing foreign nucleic acid (e.g. DNA) into a host cell, including natural competence, chemically mediated transfer, calcium phosphate or calcium chloride coprecipitation, DEAE-dextran-mediated transfection, lipofection or electroporation. Suitable methods for transformation or transfection of host cells can be found in Sambrook et al. (Molecular Cloning: A Laboratory Manual. 2^{nd} Edition, Cold Spring Harbor Laboratory, Cold Spring Harbor Laboratory Press, Cold Spring Harbor, N.Y., 1989) and other laboratory manuals.

[0081] In the case of stable transfection of mammalian cells, it is known that, depending on the expression vector used and transfection technique used, only a small proportion of the cells can integrate the foreign DNA into their genome. These integrants are usually identified and selected by introducing a gene which encodes a selectable marker (e.g. resistance to antibiotics) together with the gene of interest into the host cells. Preferred selectable markers include those which impart resistance to drugs such as G418, hygromycin and methotrexate. A nucleic acid which encodes a selectable marker may be introduced into a host cell on the same vector that encodes an MCP protein or may be introduced on a separate vector. Cells which have been stably transfected with the introduced nucleic acid may be identified for example by drug selection (for example, cells which have integrated the selectable marker survive, whereas the other cells die).

[0082] A homologous recombined microorganism is generated by preparing a vector which contains at least one MCP-gene section into which a deletion, addition or substitution has been introduced in order to modify, for example functionally disrupt, the MCP gene. This MCP gene is preferably a Corynebacterium glutamicum MCP gene, but it is also possible to use a homolog from a related bacterium or even from a mammalian, yeast or insect source. In a preferred embodiment, the vector is designed such that homologous recombination functionally disrupts the endogeneous MCP gene (i.e. the gene no longer encodes a functional protein; likewise referred to as “knockout” vector). As an alternative, the vector may be designed such that homologous recombination mutates or otherwise modifies the endogenous MCP gene which, however, still encodes the functional protein (for example, the regulatory region located upstream may be modified such that thereby the expression of the endogenous MCP protein is modified). The modified MCP-gene section in the homologous recombination vector is flanked at its 5′ and 3′ ends by additional nucleic acid of the MCP gene, which makes possible a homologous recombination between the exogenous MCP gene carried by the vector and an endogenous MCP gene in a microorganism. The length of the additional flanking MCP nucleic acid is sufficient for a successful homologous recombination with the endogenous gene. Usually, the vector contains less than one kilobase of flanking DNA (both at the 5′ and the 3′ ends) (see, for example, Thomas, K. R. and Capecchi, M. R. (1987) Cell 51:503 for a description of homologous recombination vectors). The vector is introduced into a microorganism (e.g. by electroporation) and cells in which the introduced MCP gene has homologously recombined with the endogenous MCP gene are selected using methods known in the art.

[0083] In another embodiment, it is possible to produce recombinant microorganisms which contain selected systems which make possible a regulated expression of the introduced gene. The insertion of an MCP gene into a vector brings it under the control of the lac operon and thus enables, for example, MCP-gene expression only in the presence of IPTG. These regulatory systems are known in the art.

[0084] A host cell of the invention, such as a prokaryotic or eukaryotic host cell in culture, may be used for producing (i.e. expressing) an MCP protein. Moreover, the invention provides methods for producing MCP proteins by using the host cells of the invention.

[0085] In one embodiment, the method comprises cultivation of the host cell of the invention (into which a recombinant expression vector encoding an MCP protein has been introduced or in whose genome a gene encoding a wild-type or modified MCP protein has been introduced) in a suitable medium until the MCP protein has been produced. In a further embodiment, the method comprises isolating the MCP proteins from the medium or the host cell.

[0086] C. Uses and Methods of the Invention

[0087] The nucleic acid molecules, proteins, protein homologs, fusion proteins, primers, vectors and host cells described herein may be used in one or more of the following methods: identification of C. glutamicum and related organisms, mapping of genomes of organisms related to C. glutamicum, identification and localization of C. glutamicum sequences of interest, evolutionary studies, determination of MCP-protein regions required for function, modulation of the activity of an MCP protein; modulation of the activity of one or more metabolic pathways and modulation of the cellular production of a compound of interest, such as a fine chemical. The MCP nucleic acid molecules of the invention have a multiplicity of uses. First, they may be used for identifying an organism as Corynebacterium glutamicum or close relatives thereof. They may also be used for identifying C. glutamicum or a relative thereof in a mixed population of microorganisms. The invention provides the nucleic acid sequences of a number of C. glutamicum genes. Probing the extracted genomic DNA of a culture of a uniform or mixed population of microorganisms under stringent conditions with a probe which comprises a region of a C. glutamicum gene which is unique in this organism makes it possible to determine whether said organism is present. Although Corynebacterium glutamicum itself is nonpathogenic, it is related to pathogenic species such as Corynebacterium diptheriae. The detection of such an organism is of substantial clinical importance.

[0088] C. glutamicum can be detected in a sample by using techniques known in the art. In particular, it is possible first to cultivate the cells in the sample in a suitable liquid or on a suitable solid culture medium in order to increase the number of cells in the culture. These cells are lysed and the entire DNA contained therein is extracted and, where appropriate, purified in order to remove cell debris and protein material which could interfere with the subsequent analysis. A polymerase chain reaction or a similar technique known in the art is carried out (for a general review of methodologies usually used for nucleic acid sequence amplification, see Mullis et al., U.S. Pat. No. 4,683,195, Mullis et al., U.S. Pat. No. 4,965,188 and Innis, M. A., und Gelfand, D. H. (1989) PCR-Protocols, A guide to Methods and Applications, Academic Press, pp. 3-12, and (1988) Biotechnology 6:1197, and International patent application No. WO89/01050), with primers specific for an MCP nucleic acid molecule of the invention being incubated with the nucleic acid sample such that said particular MCP nucleic acid sequence is amplified, if present in the sample. The particular nucleic acid sequence to be amplified is selected on the basis of its exclusive presence in the genome of C. glutamicum and only a few closely related bacteria. The presence of the desired amplification product indicates the presence of C. glutamicum or of an organism closely related to C. glutamicum.

[0089] Furthermore, the nucleic acid and protein molecules of the invention may serve as markers for specific regions of the genome. Using techniques known in the art, it is possible to detect the physical location of the MCP nucleic acid molecules of the invention on the C. glutamicum genome, and this in turn can be used for easier location of other nucleic acid molecules and genes on the map. Moreover, the nucleic acid molecules of the invention may be sufficiently homologous to the sequences of related species that these nucleic acid molecules may likewise enable construction of a genomic map in such bacteria (e.g. Brevibacterium lactofermentum).

[0090] The nucleic acid and protein molecules of the invention are suitable not only for mapping the genome but also for functional studies of C. glutamicum proteins. The genomic region to which a particular C. glutamicum DNA-binding protein binds may be identified, for example, by cleaving the C. glutamicum genome and incubating the fragments with the DNA-binding protein. Those fragments which bind the protein may additionally be probed with the nucleic acid molecules of the invention, preferably by using readily detectable lables; binding of such a nucleic acid molecule to the genomic fragment makes it possible to locate the fragment on the genomic map of C. glutamicum, and carrying out this process several times using different enzymes facilitates rapid determination of the nucleic acid sequence to which the protein binds.

[0091] The MCP nucleic acid molecules of the invention are likewise suitable for evolutionary studies and protein structure studies. Many prokaryotic and eukaryotic cells utilize the metabolic processes in which the molecules of the invention are involved; by comparing the sequences of the nucleic acid molecules of the invention with those sequences which encode similar enzymes from other organisms, it is possible to determine the degree of evolutionary relationship of said organisms. Accordingly, such a comparison makes it possible to determine which sequence regions are conserved and which are not, and this may be helpful in determining those regions of the protein which are essential for enzyme function. This type of determination is valuable for protein engineering studies and may give an indication as to which level the protein can tolerate mutagenesis without losing its function.

[0092] The MCP proteins of the invention can be used as markers for classifying an unknown bacterium as C. glutamicum or for identifying C. glutamicum or closely related bacteria in a sample. Using techniques known in the art, it is possible, for example, to amplify, where appropriate, cells in a sample (for example by cultivation in a suitable medium) in order to increase the sample size, and then to lyse said cells such that the proteins contained therein are released. This sample may be purified, where appropriate, in order to remove cell debris and nucleic acid molecules which could interfere with the subsequent analysis. Antibodies specific for a selected MCP protein of the invention may be incubated with the protein sample in a typical Western assay format (see, for example, Ausubel et al., (1988) Current Protocols in Molecular Biology, Wiley: N.Y.), with the antibody binding to its target protein if said protein is present in the sample. An MCP protein is selected for this type of assay if it is unique or nearly unique for C. glutamicum or for C. glutamicum and very closely related bacteria. The proteins in the sample are then fractionated via gel electrophoresis and transferred to a suitable matrix such as nitrocellulose. A suitable secondary antibody with a detectable label (e.g. chemiluminescent or colorimetric) is incubated with the matrix, followed by stringent washing. The presence or absence of the label indicates the presence or absence of the target protein in the sample. If the protein is present, then this shows the presence of C. glutamicum. A similar method makes possible the classification of an unknown bacterium as C. glutamicum; if a number of C. glutamicum-specific proteins is not detected in the protein samples prepared from the unknown bacterium, then this bacterium is probably not C. glutamicum.

[0093] Genetic manipulation of the MCP nucleic acid molecules of the invention may cause the production of MCP proteins with functional differences to wild-type MCP proteins. These proteins can be improved with respect to their efficiency or activity, they can be present in the cell in larger numbers than usually or they can be weakened with respect to their efficiency or activity.

[0094] These changes in activity can directly modulate the yield, production and/or efficiency of production of one or more fine chemicals in C. glutamicum. For example, it is possible, by modifying the activity of a protein which is involved in the biosynthesis or degradation of a fine chemical (i.e. by mutagenesis of the corresponding gene), to directly modulate the ability of the cell to synthesize or degrade said compound, thereby modulating the yield and/or the efficiency of production of the fine chemical. Likewise it is possible, by modulating the activity of a protein which regulates a fine-chemical metabolic pathway, to influence directly, whether the production of the desired compound is up or down regulated, both of which modulate the yield or efficiency of production of the fine chemical from the cell.

[0095] The indirect modulation of the production of fine chemicals may also be carried out by modifying the activity of a protein of the invention (i.e. by mutagenesis of the corresponding gene) so that the ability of the cell to grow and to divide or to remain viable or productive is increased overall. The production of fine chemicals from C. glutamicum is usually achieved by large-scale fermentative culturing of said microorganisms conditions which are frequently suboptimal for growth and cell division. Modifying a protein of the invention (e.g. a stress reaction protein, a cell wall protein or proteins which are involved in the metabolism of compounds which are necessary for cell division and cell growth to take place, such as nucleotides and amino acids) such that survival, growth and propagation under said conditions can be improved, can make it possible to increase the number and the productivity of said modified C. glutamicum cells in large-scale cultures, and this in turn should increase the yields and/or the efficiency of production of one or more of the desired fine chemicals. Furthermore, the metabolic pathways of a cell are necessarily dependent on one another and coregulated. Changing the activity of any metabolic pathway in C. glutamicum (i.e. changing the activity of one of the proteins of the invention, which is involved in such a pathway) makes it possible to change simultaneously the activity or regulation of another metabolic pathway in this microorganism, which may be involved directly in the synthesis or degradation of a fine chemical.

[0096] These abovementioned strategies for the mutagenesis of MCP proteins, which ought to increase the yields of a fine chemical from C. glutamicum, are not intended to be limiting; variations of these mutagenesis strategies are quite obvious to the skilled worker. Using these strategies and including the mechanisms disclosed herein, it is possible to use the nucleic acid and protein molecules of the invention in order to generate C. glutamicum or related bacterial strains expressing mutated MCP nucleic acid and protein molecules so as to improve the yield, production and/or efficiency of production of a compound of interest. The compound of interest may be any product produced by C. glutamicum, including the end products of biosynthetic pathways and intermediates of naturally occurring metabolic pathways and also molecules which do not naturally occur in the C. glutamicum metabolism but are produced by a C. glutamicum strain of the invention.

[0097] The following examples which are not to be understood as being limiting further illustrate the present invention. The contents of all references, patent applications, patents and published patent applications cited in this patent application are hereby incorporated by way of reference.

### EXAMPLES

### Example 1

### Preparation of Total Genomic DNA from Corynebacterium glutamicum ATCC13032

[0098] A Corynebacterium glutamicum (ATCC 13032) culture was cultivated with vigorous shaking in BHI medium (Difco) at 30° C. overnight. The cells were harvested by centrifugation, the supernatant was discarded and the cells were resuspended in 5 ml of buffer I (5% of the original culture volume—all volumes stated have been calculated for a culture volume of 100 ml). Composition of buffer I: 140.34 g/l sucrose, 2.46 g/l MgSO₄.7H₂O, 10 ml/l KH₂PO₄ solution (100 g/l, adjusted to pH 6.7 with KOH), 50 ml/l M12 concentrate (10 g/l (NH₄)₂SO₄, 1 g/l NaCl, 2 g/l MgSO₄.7H₂O, 0.2 g/l CaCl₂, 0.5 g/l yeast extract (Difco), 10 ml/l trace element mixture (200 mg/l FeSO₄.H₂O, 10 mg/l ZnSO₄.7H₂O, 3 mg/l MnCl₂.4H₂O, 30 mg/l H₃BO₃, 20 mg/l CoCl2.6H₂O, 1 mg/l NiCl₂.6H₂O, 3 mg/l Na₂MoO₄.2H₂O), 500 mg/l complexing agents (EDTA or citric acid), 100 ml/l vitamin mixture (0.2 ml/l biotin, 0.2 mg/l folic acid, 20 mg/l p-aminobenzoic acid, 20 mg/l riboflavin, 40 mg/l Ca panthothenate, 140 mg/l nicotinic acid, 40 mg/l pyridoxol hydrochloride, 200 mg/l myoinositol). Lysozyme was added to the suspension at a final concentration of 2.5 mg/ml. After incubation at 37° C. for approx. 4 h, the cell wall was degraded and the protoplasts obtained were harvested by centrifugation. The pellet was washed once with 5 ml of buffer I and once with 5 ml of TE buffer (10 mM Tris-HCl, 1 mM EDTA, pH value 8). The pellet was resuspended in 4 ml of TE buffer and 0.5 ml of SDS solution (10%) and 0.5 ml of NaCl solution (5 M) were added. After addition of proteinase K at a final concentration of 200 μg/ml, the suspension was incubated at 37° C. for approx. 18 hours. The DNA was purified via extraction with phenol, phenol/chloroform/isoamyl alcohol and chloroform/isoamyl alcohol by means of standard methods. The DNA was then precipitated by addition of 1/50 volume of 3 M sodium acetate and 2 volumes of ethanol, subsequent incubation at −20° C. for 30 min and centrifugation at 12 000 rpm in a high-speed centrifuge using an SS34 rotor (Sorvall) for 30 min. The DNA was dissolved in 1 ml of TE buffer containing 20 μg/ml RNase A and dialyed against 1000 ml of TE buffer at 4° C. for at least 3 h. The buffer was exchanged 3 times during this period. 0.4 ml of 2 M LiCl and 0.8 ml of ethanol were added to 0.4 ml aliquots of the dialyed DNA solution. After incubation at −20° C. for 30 min, the DNA was collected by centrifugation (13 000 rpm, Biofuge Fresco, Heraeus, Hanau, Germany). The DNA pellet was dissolved in TE buffer. It was possible to use DNA prepared by this method for all purposes, including Southern blotting and constructing genomic banks.

### Example 2

### Construction of Genomic Corynebacterium glutamicum (ATCC13032) Banks in Escherichia coli

[0099] Starting from DNA prepared as described in Example 1, cosmid and plasmid banks were prepared according to known and well-established methods (see, for example, Sambrook, J. et al. (1989) “Molecular Cloning: A Laboratory Manual”. Cold Spring Harbor Laboratory Press or Ausubel, F. M. et al. (1994) “Current Protocols in Molecular Biology”, John Wiley & Sons).

[0100] It was possible to use any plasmid or cosmid. Particular preference was given to using the plasmids pBR322 (Sutcliffe, J. G. (1979) Proc. Natl Acad. Sci. USA, 75: 3737-3741); pACYC177 (Change & Cohen (1978) J. Bacteriol. 134: 1141-1156); pBS series plasmids (pBSSK+, PBSSK− and others; Stratagene, LaJolla, USA) or cosmids such as SuperCosl (Stratagene, LaJolla, USA) or Lorist6 (Gibson, T. J. Rosenthal, A., and Waterson, R. H. (1987) Gene 53: 283-286.

### Example 3

### DNA Sequencing and Functional Computer Analysis

[0101] Genomic banks, as described in Example 2, were used for DNA sequencing according to standard methods, in particular the chain termination method using ABI377 sequencers (see, for example, Fleischman, R. D. et al. (1995) “Whole-genome Random Sequencing and Assembly of Haemophilus Influenzae Rd., Science 269; 496-512). Sequencing primers having the following nucleotide sequences were used: 5′-GGAAACAGTATGACCATG-3′or 5′-GTAAAACGACGGCCAGT-3′.

### Example 4

### In Vivo Mutagenesis

[0102] In vivo mutagenesis of Corynebacterium glutamicum may be carried out by passing a plasmid (or other vector) DNA through E. coli or other microorganisms (e.g. Bacillus spp. or yeasts such as Saccharomyces cerevisiae) which cannot maintain the integrity of their genetic information. Common mutator strains contain mutations in the genes for the DNA repair system (e.g., mutHLS, mutD, mutT, etc., for comparison see Rupp, W. D. (1996) DNA repair mechanisms in Escherichia coli and Salmonella, pp. 2277-2294, ASM: Washington). These strains are known to the skilled worker. The use of these strains is illustrated, for example, in Greener, A. and Callahan, M. (1994) Strategies 7; 32-34.

### Example 5

### DNA Transfer Between Escherichia coli and Corynebacterium glutamicum

[0103] A plurality of Corynebacterium and Brevibacterium species contain endogenous plasmids (such as, for example, pHM1519 or PBL1) which replicate autonomously (for a review see, for example, Martin, J. F. et al. (1987) Biotechnology 5: 137-146). Shuttle vectors for Escherichia coli and Corynebacterium glutamicum can be constructed readily by means of standard vectors for E. coli (Sambrook, J. et al., (1989), “Molecular Cloning: A Laboratory Manual”, Cold Spring Harbor Laboratory Press or Ausubel, F. M. et al. (1994) “Current Protocols in Molecular Biology”, John Wiley & Sons), to which an origin of replication for and a suitable marker from Corynebacterium glutamicum is added. Such origins of replication are preferably taken from endogenous plasmids which have been isolated from Corynebacterium and Brevibacterium species. Particular use as transformation markers for these species are genes for kanamycin resistance (such as those derived from the Tn5 or the Tn903 transposon) or for chloramphenicol (Winnacker, E. L. (1987) “From Genes to Clones—Introduction to Gene Technology, VCH, Weinheim). There are numerous examples in the literature for preparing a large multiplicity of shuttle vectors which are replicated in E. coli and C. glutamicum and which can be used for various purposes, including the overexpression of genes (see, for example, Yoshihama, M. et al. (1985) J. Bacteriol. 162: 591-597, Martin, J. F. et al., (1987) Biotechnology, 5: 137-146 and Eikmanns, B. J. et al. (1992) Gene 102: 93-98).

[0104] Standard methods make it possible to clone a gene of interest into one of the above-described shuttle vectors and to introduce such hybrid vectors into Corynebacterium glutamicum strains. C. glutamicum can be transformed via protoplast transformation (Kastsumata, R. et al., (1984) J. Bacteriol. 159, 306-311), electroporation (Liebl, E. et al., (1989) FEMS Microbiol. Letters, 53: 399-303) and, in cases in which specific vectors are used, also via conjugation (as described, for example, in Schafer, A., et al. (1990) J. Bacteriol. 172: 1663-1666). Likewise, it is possible to transfer the shuttle vectors for C. glutamicum to E. coli by preparing plasmid DNA from C. glutamicum (by means of standard methods known in the art) and transforming it into E. coli. This transformation step can be carried out using standard methods but advantageously an Mcr-deficient E. coli strain such as NM522 (Gough & Murray (1983) J. Mol. Biol. 166: 1-19) is used.

### Example 6

### Determination of the Expression of the Mutated Protein

[0105] The observations of the activity of a mutated protein in a transformed host cell are based on the fact that the mutated protein is expressed in a similar manner and in similar quantity to the wild-type protein. A suitable method for determining the amount of transcription of the mutated gene (an indication of the amount of mRNA available for translation of the gene product) is to carry out a Northern blot (see, for example, Ausubel et al., (1988) Current Protocols in Molecular Biology, Wiley: N.Y.), with a primer which is designed such that it binds to the gene of interest being provided with a detectable (usually radioactive or chemiluminescent) label such that—when the total RNA of a culture of the organism is extracted, fractionated on a gel, transferred to a stable matrix and incubated with this probe—binding and binding quantity of the probe indicate the presence and also the amount of mRNA for said gene. This information is an indicator for the extent for which the mutated gene has been transcribed. Total cell RNA can be isolated from Corynebacterium glutamicum by various methods known in the art, as described in Bormann, E. R. et al., (1992) Mol. Microbiol. 6: 317-326.

[0106] The presence or the relative amount of protein translated from said mRNA can be determined by using standard techniques such as Western blot (see, for example, Ausubel et al. (1988) “Current Protocols in Molecular Biology”, Wiley, N.Y.). In this method, total cell proteins are extracted, separated by gel electrophoresis, transferred to a matrix such as nitrocellulose and incubated with a probe, for example an antibody, which binds specifically to the protein of interest. This probe is usually provided with a chemiluminescent or calorimetric label which can be detected readily. The presence and the observed amount of label indicate the presence and the amount of the desired mutant protein in the cell.

### Example 7

### Growth of Genetically Modified Corynebacterium glutamicum—Media and Cultivation Conditions

[0107] Genetically modified Corynebacteria are cultivated in synthetic or natural growth media. A number of different growth media for Corynebacteria are known and readily available (Lieb et al. (1989) Appl. Microbiol. Biotechnol. 32: 205-210; von der Osten et al. (1998) Biotechnology Letters 11: 11-16; Patent DE 4 120 867; Liebl (1992) “The Genus Corynebacterium”, in: The Procaryotes, Vol. II, Balows, A., et al., editors Springer-Verlag). These media are composed of one or more carbon sources, nitrogen sources, inorganic salts, vitamins and trace elements. Preferred carbon sources are sugars such as mono-, di- or polysaccharides. Examples of very good carbon sources are glucose, fructose, mannose, galactose, ribose, sorbose, ribulose, lactose, maltose, sucrose, raffinose, starch and cellulose. Sugars may also be added to the media via complex compounds such as molasses or other byproducts from sugar refining. It may also be advantageous to add mixtures of various carbon sources. Other possible carbon sources are alcohols and organic acids, such as methanol, ethanol, acetic acid or lactic acid. Nitrogen sources are usually organic or inorganic nitrogen compounds or materials containing these compounds. Examples of nitrogen sources include ammonia gas and ammonium salts such as NH₄Cl or (NH₄)₂SO₄, NH₄OH, nitrates, urea, amino acids and complex nitrogen sources such as cornsteep liquor, soya meal, soya protein, yeast extracts, meat extracts and others.

[0108] Inorganic salt compounds which may be present in the media include the chloride, phosphorus or sulfate salts of calcium, magnesium, sodium, cobalt, molybdenum, potassium, manganese, zinc, copper and iron. Chelating agents may be added to the medium in order to keep the metal ions in solution. Particularly suitable chelating agents include dihydroxyphenols such as catechol or protocatechuate and organic acids such as citric acid. The media usually also contain other growth factors such as vitamins or growth promoters, examples of which include biotin, riboflavin, thiamine, folic acid, nicotinic acid, panthothenate and pyridoxine. Growth factors and salts are frequently derived from complex media components such as yeast extract, molasses, cornsteep liquor and the like. The exact composition of the media heavily depends on the particular experiment and is decided upon individually for each case. Information on the optimization of media can be found in the textbook “Applied Microbiol. Physiology, A Practical Approach” (editors P. M. Rhodes, P. F. Stanbury, IRL Press (1997) pp. 53-73, ISBN 0 19 963577 3). Growth media can also be obtained from commercial suppliers, for example Standard 1 (Merck) or BHI (brain heart infusion, DIFCO) and the like.

[0109] All media components are sterilized, either by heat (20 min at 1.5 bar and 121° C.) or by sterile filtration. The components may be sterilized either together or, if required, separately. All media components may be present at the start of the cultivation or added continuously or batchwise, as desired.

[0110] The cultivation conditions are defined separately for each experiment. The temperature should be between 15° C. and 45° C. and may be kept constant or may be altered during the experiment. The pH of the medium should be in the range from 5 to 8.5, preferably around 7.0 and may be maintained by adding buffers, to the media. An example of a buffer for this purpose is a potassium phosphate buffer. Synthetic buffers such as MOPS, HEPES; ACES, etc. may be used alternatively or simultaneously. Addition of NaOH or NH₄OH can also keep the pH constant during cultivation. If complex media components such as yeast extract are used, the demand for additional buffers decreases, since many complex compounds have a high buffer capacity. In the case of using a fermenter for cultivating microorganisms, the pH may also be regulated using gaseous ammonia.

[0111] The incubation period is usually in a range from several hours to several days. This time is selected such that the maximum amount of product accumulates in the broth. The growth experiments disclosed may be carried out in a multiplicity of containers such as microtiter plates, glass tubes, glass flasks or glass or metal fermenters of different sizes. For the screening of a large number of clones, the microorganisms should be grown in microtiter plates, glass tubes or shaker flasks either with or without baffles. Preference is given to using 100 ml shaker flasks which are filled with 10% (based on volume) of the required growth medium. The flasks should be shaken on an orbital shaker (amplitude 25 mm) at a speed in the range of 100-300 rpm. Losses due to evaporation can be reduced by maintaining a humid atmosphere; alternatively, the losses due to evaporation should be corrected mathematically.

[0112] If genetically modified clones are investigated, an unmodified control clone or a control clone containing the basic plasmid without insert should also be assayed. The medium is inoculated to an OD₆₀₀ of 0.5-1.5, with cells being used which have been grown on agar plates such as CM plates (10 g/l glucose, 2.5 g/l NaCl, 2 g/l urea, 10 g/l polypeptone, 5 g/l yeast extract, 5 g/l meat extract, 22 g/l agar pH 6.8 with 2 M NaOH) which have been incubated at 30° C. The media are inoculated either by introducing a saline solution of C. glutamicum cells from CM plates or by adding a liquid preculture of said bacterium.

### Example 8

### In Vitro Analysis of the Function of Mutated Proteins

[0113] The determination of the activities and kinetics of enzymes is well known in the art. Experiments for determining the activity of a particular modified enzyme must be adapted to the specific activity of the wild-type enzyme, and this is within the capabilities of the skilled worker. Overviews regarding enzymes in general and also specific details concerning the structure, kinetics, principles, methods, applications and examples of the determination of many enzyme activities can be found, for example, in the following references: Dixon, M., and Webb, E. C: (1979) Enzymes, Longmans, London; Fersht (1985) Enzyme Structure and Mechanism, Freeman, N.Y.; Walsh (1979) Enzymatic Reaction Mechanisms. Freeman, San Francisco; Price, N. C., Stevens, L. (1982) Fundamentals of Enzymology. Oxford Univ. Press: Oxford; Boyer, P. D: editor (1983) The Enzymes, 3rd edition, Academic Press, New York; Bisswanger, H. (1994) Enzymkinetik, 2nd edition VCH, Weinheim (ISBN 3527300325); Bergmeyer, H. U., Bergmeyer, J., Graβ1, M. editors (1983-1986) Methods of Enzymatic Analysis, 3rd edition, Vol. I-XII, Verlag Chemie: Weinheim; and Ullmann's Encyclopedia of Industrial Chemistry (1987) Vol. A9, “Enzymes”, VCH, Weinheim, pp. 352-363.

[0114] The activities of proteins binding to DNA can be measured by many well-established methods such as DNA bandshift assays (which are also referred to as gel retardation assays). The action of these proteins on the expression of other molecules can be measured using reporter gene assays (as described in Kolmar, H. et al., (1995) EMBO J. 14: 3895-3904 and in references therein). Reporter gene assay systems are well-known and established for applications in prokaryotic and eukaryotic cells, with enzymes such as beta-galactosidase, green fluorescent protein and several other enzymes being used.

[0115] The activity of membrane transport proteins can be determined according to the techniques described in Gennis, R. B. (1989) “Pores, Channels and Transporters”, in Biomembranes, Molecular Structure and Function, Springer: Heidelberg, pp. 85-137; 199-234; and 270-322.

### Example 9

### Analysis of the Influence of Mutated Protein on the Production of the Product of Interest

[0116] The effect of the genetic modification in C. glutamicum on the production of a compound of interest (such as an amino acid) can be determined by growing the modified microorganisms under suitable conditions (such as those described above) and testing the medium and/or the cellular components for increased production of the product of interest (i.e. an amino acid). Such analytical techniques are well known to the skilled worker and include spectroscopy, thin-layer chromatography, various types of coloring methods, enzymic and microbiological methods and analytical chromatography such as high performance liquid chromatography (see, for example, Ullman, Encyclopedia of Industrial Chemistry, Vol. A2, pp. 89-90 and pp. 443-613, VCH: Weinheim (1985); Fallon, A., et al., (1987) “Applications of HPLC in Biochemistry” in: Laboratory Techniques in Biochemistry and Molecular Biology, Vol. 17; Rehm et al. (1993) Biotechnology, Vol. 3, Chapter III: “Product recovery and purification”, pp. 469-714, VCH: Weinheim; Belter, P. A. et al. (1988) Bioseparations: downstream processing for Biotechnology, John Wiley and Sons; Kennedy, J. F. and Cabral, J. M. S. (1992) Recovery processes for biological Materials, John Wiley and Sons; Shaeiwitz, J. A. and Henry, J. D. (1988) Biochemical Separations, in Ullmann's Encyclopedia of Industrial Chemistry, Vol. B3; Chapter 11, pp. 1-27, VCH: Weinheim; and Dechow, F. J. (1989) Separation and purification techniques in biotechnology, Noyes Publications).

[0117] In addition to measuring the end product of the fermentation, it is likewise possible to analyze other components of the metabolic pathways, which are used for producing the compound of interest, such as intermediates and byproducts, in order to determine the overall efficiency of production of the compound. The analytical methods include measuring the amounts of nutrients in the medium (for example sugars, hydrocarbons, nitrogen sources, phosphate and other ions), measuring biomass composition and growth, analyzing the production of common metabolites from biosynthetic pathways and measuring gases generated during fermentation. Standard methods for these measurements are described in Applied Microbial Physiology; A Practical Approach, P. M. Rhodes and P. F. Stanbury, editors IRL Press, pp. 103-129; 131-163 and 165-192 (ISBN: 0199635773) and the references therein.

### Example 10

### Purification of the Product of Interest from a C. glutamicum Culture

[0118] The product of interest may be obtained from C. glutamicum cells or from the supernatant of the above-described culture by various methods known in the art. If the product of interest is not secreted by the cells, the cells may be harvested from the culture by slow centrifugation, and the cells may be lysed by standard techniques such as mechanial force or sonication. The cell debris is removed by centrifugation and the supernatant fraction which contains the soluble proteins is obtained for further purification of the compound of interest. If the product is secreted by the C. glutamicum cells, the cells are removed from the culture by slow centrifugation and the supernatant fraction is retained for further purification.

[0119] The supernatant fraction from both purification methods is subjected to chromatography using a suitable resin, and either the molecule of interest is retained on the chromatography resin while many contaminants in the sample are not or the contaminants remain on the resin while the sample does not. If necessary, these chromatography steps can be repeated using the same or different chromatography resins. The skilled worker is familiar with the selection of suitable chromatography resins and the most effective application for a particular molecule to be purified. The purified product may be concentrated by filtration or ultrafiltration and stored at a temperature at which product stability is highest.

[0120] In the art, many purification methods are known which are not limited to the above purification method and which are described, for example, in Bailey, J. E. & Ollis, D. F. Biochemical Engineering Fundamentals, McGraw-Hill: New York (1986).

[0121] The identity and purity of the isolated compounds can be determined by techniques of the art. These techniques comprise high performance liquid chromatography (HPLC), spectroscopic methods, coloring methods, thin-layer chromatography, NIRS, enzyme assays or microbiological assays. These analytical methods are compiled in: Patek et al. (1994) Appl. Environ. Microbiol. 60: 133-140; Malakhova et al. (1996) Biotekhnologiya 11: 27-32; and Schmidt et al. (1998) Bioprocess Engineer. 19: 67-70. Ulmann's Encyclopedia of Industrial Chemistry (1996) Vol. A27, VCH: Weinheim, pp. 89-90, pp. 521-540, pp. 540-547, pp. 559-566, 575-581 and pp. 581-587; Michal, G (1999) Biochemical Pathways: An Atlas of Biochemistry and Molecular Biology, John Wiley and Sons; Fallon, A. et al. (1987) Applications of HPLC in Biochemistry in: Laboratory Techniques in Biochemistry and Molecular Biology, Vol. 17.

[0122] Equivalents

[0123] The skilled worker knows, or can identify by using simply routine methods a large number of equivalents of the specific embodiments of the invention. These equivalents are intended to be included in the patent claims below.

[0124] The information in Table 1 is to be understood as follows:

[0125] In column 1, “DNA-ID”, the relevant number refers in each case to the SEQ ID NO of the enclosed sequence listing. Consequently, “5” in column “DNA-ID” is a reference to SEQ ID NO:5.

[0126] In column 2, “AA-ID”, the relevant number refers in each case to the SEQ ID NO of the enclosed sequence listing. Consequently, “6” in column “AA-ID” is a reference to SEQ ID NO:6.

[0127] In column 3, “Identification”, an unambiguous internal name for each sequence is listed.

[0128] In column 4, “AA-POS”, the relevant number refers in each case to the amino acid position of the polypeptide sequence “AA-ID” in the same row. Consequently, “26” in column “AA-POS” is amino acid position 26 of the polypeptide sequence indicated accordingly. Position counting starts at the N terminals with +1.

[0129] In column 5, “AA wild-type”, the relevant letter refers in each case to the amino acid, displayed in the one-letter code, at the position in the corresponding wild-type strain, which is indicated in column 4.

[0130] In column 6, “AA mutant”, the relevant letter refers in each case to the amino acid, displayed in the one-letter code, at the position in the corresponding mutant strain, which is indicated in column 4.

[0131] In column 7, “Function”, the physiological function of the corresponding polypeptide sequence is listed.

[0132] One-letter code of the proteinogenic amino acids:
[0133] A Alanine
[0134] C Cysteine
[0135] D Aspartic acid
[0136] E Glutamic acid
[0137] F Phenylalanine
[0138] G Glycine
[0139] H His
[0140] I Isoleucine
[0141] K Lysine
[0142] L Leucine
[0143] M Methionine
[0144] N Asparagine
[0145] P Proline
[0146] Q Glutamine
[0147] R Arginine
[0148] S Serine
[0149] T Threonine
[0150] V Valine
[0151] W Tryptophan

[0152] Y Tyrosine

TABLE 1
Genes coding for novel proteins

| | | | | AA | | |
|---|---|---|---|---|---|---|
| DNA | AA | | AA | wild | AA | |
| ID: | ID: | Identification: | pos: | type | mutant | Function: |
| 1 | 2 | RXA00033 | 158 | L | F | TRANSPORTER |
| | | | 382 | G | E | TRANSPORTER |
| 3 | 4 | RXA00054 | 613 | A | V | DNA/RNA HELICASE (DEAD/DEAH BOX FAMILY) |
| 5 | 6 | RXA00056 | 262 | G | D | Hypothetical Exported Protein |
| 7 | 8 | RXA00065 | 101 | S | F | hypothetical protein |
| 9 | 10 | RXA00068 | 35 | S | N | hypothetical protein |
| 11 | 12 | RXA00077 | 374 | A | T | HUNTINGTIN INTERACTING PROTEIN HYPE |
| 13 | 14 | RXA00080 | 70 | G | D | INTEGRAL MEMBRANE PROTEIN |
| | | | 253 | P | S | INTEGRAL MEMBRANE PROTEIN |
| 15 | 16 | RXA00110 | 172 | S | F | Hypothetical Membrane Spanning Protein |
| 17 | 18 | RXA00118 | 53 | V | I | Hypothetical Cytosolic Protein |
| 19 | 20 | RXA00121 | 164 | G | D | hypothetical protein |
| 21 | 22 | RXA00150 | 85 | G | D | Hypothetical Membrane Spanning Protein |
| 23 | 24 | RXA00151 | 110 | V | I | hypothetical protein |
| 25 | 26 | RXA00155 | 231 | P | S | hypothetical protein |
| 27 | 28 | RXA00185 | 508 | D | N | Hypothetical Cytosolic Protein |
| 29 | 30 | RXA00197 | 322 | A | V | MEMBRANE METALLOPROTEASE |
| 31 | 32 | RXA00199 | 12 | P | S | hypothetical protein |
| | | | 370 | L | F | hypothetical protein |
| 33 | 34 | RXA00211 | 44 | V | I | GLUTAMYL-TRNA(GLN) AMIDOTRANSFERASE SUBUNIT B (EC 6.3.5.—) |
| 35 | 36 | RXA00220 | 122 | G | D | ACETYLTRANSFERASE (EC 2.3.1.—) |
| 37 | 38 | RXA00240 | 8 | R | K | hypothetical protein |
| 39 | 40 | RXA00354 | 67 | G | E | Hydrolase (HAD superfamily) |
| 41 | 42 | RXA00397 | 236 | A | V | XAA-PRO AMINOPEPTIDASE (EC 3.4.11.9) |
| 43 | 44 | RXA00409 | 217 | G | D | TRANSPORTER |
| 45 | 46 | RXA00416 | 223 | A | V | Hypothetical Membrane Spanning Protein |
| 47 | 48 | RXA00424 | 4 | R | K | hypothetical protein |
| 49 | 50 | RXA00451 | 78 | S | N | CYTOSINE DEAMINASE (EC 3.5.4.1) |
| 51 | 52 | RXA00476 | 274 | G | E | hypothetical protein |
| | | | 287 | G | R | hypothetical protein |
| 53 | 54 | RXA00486 | 80 | R | H | TRANSCRIPTIONAL REGULATORY PROTEIN, LYSR FAMILY |
| 55 | 56 | RXA00493 | 363 | A | T | 60 KD CHAPERONIN GROEL |
| 57 | 58 | RXA00496 | 340 | P | L | hypothetical protein |
| 59 | 60 | RXA00503 | 186 | A | T | putative sugar kinase |
| 61 | 62 | RXA00507 | 224 | A | V | LIPASE (EC 3.1.1.3) |
| 63 | 64 | RXA00510 | 17 | G | S | hypothetical protein |
| 65 | 66 | RXA00550 | 554 | S | F | PENICILLIN-BINDING PROTEIN 1A |
| 67 | 68 | RXA00552 | 295 | A | T | THIOSULFATE SULFURTRANSFERASE (EC 2.8.1.1) |
| 69 | 70 | RXA00576 | 157 | E | K | hypothetical protein |
| 71 | 72 | RXA00611 | 291 | I | T | TRANSPORTER |
| 73 | 74 | RXA00614 | 86 | P | S | PHOSPHOESTERASE |
| 75 | 76 | RXA00637 | 148 | E | K | TRANSCRIPTIONAL REGULATOR, MERR FAMILY |
| 77 | 78 | RXA00654 | 399 | S | F | INNER MEMBRANE PROTEIN |
| 79 | 80 | RXA00678 | 127 | A | T | hypothetical protein |
| 81 | 82 | RXA00691 | 214 | A | T | Hypothetical Cytosolic Protein |
| 83 | 84 | RXA00719 | 306 | D | N | GTP-BINDING PROTEIN |
| | | | 468 | A | T | GTP-BINDING PROTEIN |
| 85 | 86 | RXA00731 | 550 | A | T | TRANSPORTER |
| | | | 776 | L | F | TRANSPORTER |
| 87 | 88 | RXA00740 | 93 | A | T | hypothetical protein |
| 89 | 90 | RXA00812 | 106 | A | V | INHIBITION OF MORPHOLOGICAL DIFFERENTIATION |
| 91 | 92 | RXA00831 | 166 | A | T | Hypothetical Cytosolic Protein |
| 93 | 94 | RXA00835 | 54 | A | V | Hypothetical Membrane Spanning Protein |
| 95 | 96 | RXA00917 | 635 | D | N | hypothetical protein |
| 97 | 98 | RXA00943 | 55 | P | S | hypothetical protein |
| | | | 123 | L | F | hypothetical protein |
| 99 | 100 | RXA00963 | 211 | P | S | 2-HYDROXYHEPTA-2,4-DIENE-1,7-DIOATE ISOMERASE (EC 5.3.3.—)/ |
| | | | | | | 5-CARBOXYMETHYL-2- |
| | | | | | | OXO-HEX-3-ENE-1,7-DIOATE DECARBOXYLASE (EC 4.1.1.—) |
| 101 | 102 | RXA01011 | 201 | A | T | Hypothetical Cytosolic Protein |
| 103 | 104 | RXA01017 | 37 | V | I | Hypothetical Cytosolic Protein |
| 105 | 106 | RXA01037 | 28 | G | D | hypothetical protein |
| 107 | 108 | RXA01046 | 408 | A | V | ATP-DEPENDENT CLP PROTEASE ATP-BINDING SUBUNIT CLPA |
| 109 | 110 | RXA01109 | 113 | A | V | hypothetical protein |
| 111 | 112 | RXA01122 | 104 | R | C | hypothetical protein |
| 113 | 114 | RXA01127 | 60 | D | N | 3-ISOPROPYLMALATE DEHYDROGENASE (EC 1.1.1.85) |
| 115 | 116 | RXA01128 | 221 | T | I | TAURINE-BINDING PERIPLASMIC PROTEIN PRECURSOR |
| 117 | 118 | RXA01129 | 2 | V | I | cyclic nucleotide binding protein/2 CBS domains |
| 119 | 120 | RXA01173 | 146 | A | T | Hypothetical Secreted Protein |
| 121 | 122 | RXA01174 | 174 | L | F | Hypothetical Membrane Glycoprotein |
| 123 | 124 | RXA01184 | 363 | R | K | ABC TRANSPORTER INTEGRAL MEMBRANE PROTEIN |
| | | | 430 | G | D | ABC TRANSPORTER INTEGRAL MEMBRANE PROTEIN |
| 125 | 126 | RXA01196 | 81 | G | D | Hypothetical Cytosolic Protein |
| 127 | 128 | RXA01263 | 74 | S | F | O-ANTIGEN ACETYLASE |
| 129 | 130 | RXA01268 | 150 | D | N | CAPM PROTEIN |
| 131 | 132 | RXA01271 | 307 | S | F | CAPD PROTEIN |
| 131 | 132 | RXA01271 | 525 | L | F | CAPD PROTEIN |
| 133 | 134 | RXA01273 | 106 | A | V | Hypothetical Membrane Associated Protein |
| 135 | 136 | RXA01315 | 20 | A | T | TRANSCRIPTIONAL REGULATOR, TETR FAMILY |
| | | | 101 | G | D | TRANSCRIPTIONAL REGULATOR, TETR FAMILY |
| 137 | 138 | RXA01318 | 67 | A | V | putative membrane protein |
| 139 | 140 | RXA01326 | 103 | A | V | hypothetical protein |
| 141 | 142 | RXA01331 | 13 | T | I | Hypothetical Membrane Spanning Protein |
| | | | 403 | P | S | Hypothetical Membrane Spanning Protein |
| | | | 544 | T | I | Hypothetical Membrane Spanning Protein |
| 143 | 144 | RXA01400 | 549 | G | R | Hypothetical Cytosolic Protein |
| 145 | 146 | RXA01425 | 85 | E | K | 60 KDA INNER MEMBRANE PROTEIN YIDC |
| 147 | 148 | RXA01434 | 957 | S | F | VIRULENCE FACTOR MVIN |
| | | | 1012 | P | S | VIRULENCE FACTOR MVIN |
| 149 | 150 | RXA01439 | 116 | L | F | ACETYLTRANSFERASE (EC 2.3.1.—) |
| 151 | 152 | RXA01441 | 104 | C | R | hypothetical protein |
| 153 | 154 | RXA01448 | 159 | G | D | INTEGRAL MEMBRANE PROTEIN |
| 155 | 156 | RXA01518 | 148 | A | T | Hypothetical Membrane Spanning Protein |
| 157 | 158 | RXA01536 | 121 | A | V | hypothetical protein |
| | | | 308 | A | V | hypothetical protein |
| | | | 375 | A | T | hypothetical protein |
| 159 | 160 | RXA01544 | 78 | V | I | hypothetical protein |
| 161 | 162 | RXA01548 | 153 | G | D | hypothetical protein |
| 163 | 164 | RXA01549 | 31 | S | G | Hypothetical Membrane Spanning Protein |
| | | | 53 | A | T | Hypothetical Membrane Spanning Protein |
| | | | 159 | A | T | Hypothetical Membrane Spanning Protein |
| 165 | 166 | RXA01554 | 124 | G | D | GLUCAN ENDO-1,3-BETA-GLUCOSIDASE A1 PRECURSOR (EC 3.2.1.39) |
| | | | 486 | G | R | GLUCAN ENDO-1,3-BETA-GLUCOSIDASE A1 PRECURSOR (EC 3.2.1.39) |
| 167 | 168 | RXA01574 | 123 | P | S | GLYCOSYL TRANSFERASE |
| 169 | 170 | RXA01585 | 112 | V | M | hypothetical protein Rv2474c |
| 171 | 172 | RXA01590 | 1432 | E | K | hypothetical protein |
| 173 | 174 | RXA01628 | 67 | D | N | Hypothetical Membrane Glycoprotein |
| | | | 224 | G | D | Hypothetical Membrane Glycoprotein |
| 175 | 176 | RXA01642 | 165 | G | E | EXTRACELLULAR SUBTILISIN-LIKE PROTEASE |
| | | | | | | PRECURSOR (EC 3.4.21.—) |
| | | | 294 | A | T | EXTRACELLULAR SUBTILISIN-LIKE PROTEASE |
| | | | | | | PRECURSOR (EC 3.4.21.—) |
| 177 | 178 | RXA01647 | 112 | D | N | Hypothetical Membrane Associated Protein |
| | | | 167 | G | S | Hypothetical Membrane Associated Protein |
| 179 | 180 | RXA01672 | 56 | G | D | Hypothetical Membrane Spanning Protein |
| | | | 68 | L | F | Hypothetical Membrane Spanning Protein |
| 181 | 182 | RXA01677 | 209 | G | R | THIOL:DISULFIDE INTERCHANGE PROTEIN DSBA |
| 183 | 184 | RXA01693 | 102 | A | T | Hypothetical Cytosolic Protein |
| 185 | 186 | RXA01741 | 17 | D | N | hypothetical protein |
| 187 | 188 | RXA01749 | 189 | A | V | INTEGRAL MEMBRANE PROTEIN WITH TRKA DOMAINS |
| | | | 212 | P | S | INTEGRAL MEMBRANE PROTEIN WITH TRKA DOMAINS |
| | | | 420 | A | T | INTEGRAL MEMBRANE PROTEIN WITH TRKA DOMAINS |
| 189 | 190 | RXA01754 | 596 | D | N | hypothetical protein |
| 191 | 192 | RXA01761 | 441 | R | C | hypothetical protein |
| | | | 1376 | G | S | hypothetical protein |
| 193 | 194 | RXA01770 | 243 | D | N | DNA HELICASE II (EC 3.6.1.—) |
| 195 | 198 | RXA01771 | 222 | P | S | Membrane protease subunits, stomatin/prohibitin homologs |
| 197 | 198 | RXA01776 | 169 | L | F | Hypothetical Membrane Spanning Protein |
| 199 | 200 | RXA01778 | 81 | S | F | hypothetical protein |
| 201 | 202 | RXA01779 | 229 | T | A | Hypothetical Exported Protein |
| 203 | 204 | RXA01789 | 104 | L | F | hypothetical protein |
| 205 | 206 | RXA01791 | 60 | A | V | hypothetical protein |
| 207 | 208 | RXA01809 | 128 | R | Q | Hypothetical Membrane Associated Protein |
| 209 | 210 | RXA01825 | 75 | G | D | Hypothetical Membrane Spanning Protein |
| 211 | 212 | RXA01842 | 246 | P | S | QUINONE OXIDOREDUCTASE (EC 1.6.5.5) |
| 213 | 214 | RXA01899 | 233 | S | N | Hypothetical Cytosolic Protein |
| 215 | 216 | RXA01905 | 103 | V | I | Hypothetical Exported Protein |
| 219 | 220 | RXA01910 | 220 | G | S | hypothetical protein |
| 221 | 222 | RXA01945 | 629 | E | K | Hypothetical Exported Protein |
| | | | 1382 | G | D | Hypothetical Exported Protein |
| 223 | 224 | RXA01966 | 46 | A | V | OLIGORIBONUCLEASE (EC 3.1.—.—) |
| 225 | 226 | RXA01982 | 341 | A | T | hypothetical protein |
| 227 | 228 | RXA02021 | 305 | S | F | 2.3,4.5-TETRAHYDROPYRIDINE-2-CARBOXYLATE N- |
| | | | | | | SUCCINYLTRANSFERASE (HOMOLOG) |
| 229 | 230 | RXA02032 | 208 | G | S | INTEGRAL MEMBRANE PROTEIN |
| 231 | 232 | RXA02053 | 66 | H | Y | DRGA PROTEIN |
| 233 | 234 | RXA02058 | 188 | S | F | hypothetical protein |
| 235 | 236 | RXA02059 | 24 | G | R | Hypothetical Membrane Spanning Protein |
| 237 | 238 | RXA02070 | 150 | A | T | MRP PROTEIN HOMOLOG |
| 239 | 240 | RXA02084 | 105 | A | V | hypothetical protein |
| 241 | 242 | RXA02091 | 170 | E | K | hypothetical protein |
| 243 | 244 | RXA02097 | 28 | A | V | TRANSCRIPTIONAL REGULATOR |
| | | | 427 | G | R | TRANSCRIPTIONAL REGULATOR |
| 245 | 246 | RXA02104 | 39 | T | I | GLYCERATE KINASE (EC 2.7.1.31) |
| 247 | 248 | RXA02123 | 678 | L | F | MAGNESIUM-CHELATASE SUBUNIT CHLI |
| 249 | 250 | RXA02138 | 88 | A | V | HESB PROTEIN |
| 251 | 252 | RXA02151 | 165 | A | T | Hypothetical Membrane Spanning Protein |
| 253 | 254 | RXA02163 | 23 | P | S | hypothetical protein |
| 255 | 256 | RXA02185 | 104 | G | S | RPF PROTEIN PRECURSOR |
| 257 | 258 | RXA02186 | 39 | S | F | Hypothetical Cytosolic Protein |
| 259 | 260 | RXA02203 | 36 | D | N | hypothetical protein |
| 261 | 262 | RXA02206 | 73 | G | D | OXIDOREDUCTASE (EC 1.1.1.—) |
| | | | 114 | A | T | OXIDOREDUCTASE (EC 1.1.1.—) |
| | | | 314 | R | C | OXIDOREDUCTASE (EC 1.1.1.—) |
| 263 | 264 | RXA02217 | 65 | E | K | quinate dehydrogenase (pyrroloquinoline-quinone) (EC 1.1.99.25) |
| | | | 92 | T | I | quinate dehydrogenase (pyrroloquinoline-quinone) (EC 1.1.99.25) |
| 265 | 268 | RXA02219 | 292 | V | M | Hypothetical Cytosolic Protein |
| 267 | 268 | RXA02221 | 176 | L | F | hypothetical protein |
| 269 | 270 | RXA02267 | 65 | A | T | DNA (CYTOSINE-5)-METHYLTRANSFERASE (EC 2.1.1.37) |
| 271 | 272 | RXA02271 | 126 | G | D | Hypothetical Exported Protein |
| 273 | 274 | RXA02280 | 502 | A | V | HEAT SHOCK PROTEIN HTPG |
| 275 | 276 | RXA02294 | 57 | E | K | hypothetical protein |
| 277 | 278 | RXA02295 | 130 | G | D | TRANSPORTER |
| 279 | 280 | RXA02296 | 61 | S | N | Hypothetical Exported Protein |
| 281 | 282 | RXA02298 | 447 | L | F | Hypothetical Cytosolic Protein |
| 283 | 284 | RXA02302 | 279 | G | E | CHLORAMPHENICOL-SENSITIVE PROTEIN RARD |
| 285 | 286 | RXA02303 | 268 | G | D | hypothetical protein |
| 289 | 290 | RXA02339 | 38 | P | S | Hypothetical Cytosolic Protein |
| 291 | 292 | RXA02360 | 243 | V | I | TYPE I RESTRICTION-MODIFICATION SYSTEM DNA METHYLASE |
| 293 | 294 | RXA02362 | 525 | M | I | TRANSCRIPTIONAL REGULATOR |
| 295 | 296 | RXA02367 | 3 | I | V | PIRIN |
| 297 | 298 | RXA02387 | 10 | A | T | Hypothetical Cytosolic Protein |
| 299 | 300 | RXA02390 | 195 | G | D | THREONINE EFFLUX PROTEIN |
| 301 | 302 | RXA02395 | 533 | A | V | TRANSPORTER |
| 303 | 304 | RXA02425 | 34 | G | E | Heavy-Metal Cation Transporter |
| 305 | 306 | RXA02433 | 9 | S | N | hypothetical protein |
| 307 | 308 | RXA02486 | 141 | T | I | Hypothetical Cytosolic Protein |
| 309 | 310 | RXA02488 | 27 | A | T | HEME TRANSPORT ASSOCIATED PROTEIN |
| 311 | 312 | RXA02495 | 81 | G | S | ABC TRANSPORTER INTEGRAL MEMBRANE PROTEIN |
| 313 | 314 | RXA02570 | 184 | R | C | ABC TRANSPORTER INTEGRAL MEMBRANE PROTEIN |
| 315 | 316 | RXA02591 | 377 | P | S | PHOSPHOENOLPYRUVATE CARBOXYKINASE [GTP] (EC 4.1.1.32) |
| 317 | 318 | RXA02604 | 570 | G | D | Hypothetical Membrane Spanning Protein |
| 319 | 320 | RXA02678 | 3 | M | I | Hypothetical Cytosolic Protein |
| 321 | 322 | RXA02683 | 81 | G | S | hypothetical protein |
| 323 | 324 | RXA02721 | 181 | G | S | Hypothetical Cytosoilc Protein |
| 325 | 326 | RXA02725 | 208 | A | V | hypothetical protein |
| 327 | 328 | RXA02735 | 27 | P | S | 6-PHOSPHOGLUCONOLACTONASE (EC 3.1.1.31) |
| 329 | 330 | RXA02736 | 312 | S | F | PUTATIVE OXPPCYCLE PROTEIN OPCA |
| 331 | 332 | RXA02744 | 231 | M | I | PUTATIVE INTEGRAL MEMBRANE TRANSPORT PROTEIN |
| 333 | 334 | RXA02757 | 73 | P | S | hypothetical protein |
| 335 | 336 | RXA02777 | 306 | G | D | Hypothetical Cytosolic Protein |
| 337 | 338 | RXA02784 | 4 | A | V | hypothetical protein |
| 339 | 340 | RXA02786 | 292 | E | K | hypothetical protein |
| 341 | 342 | RXA02798 | 457 | L | S | SULFITE REDUCTASE (NADPH) FLAVOPROTEIN ALPHA- |
| | | | | | | COMPONENT (EC 1.8.1.2) |
| 343 | 344 | RXA02817 | 227 | G | D | AEFA PROTEIN |
| 345 | 346 | RXA02825 | 362 | S | F | HEME TRANSPORT ASSOCIATED PROTEIN |
| 347 | 348 | RXA02951 | 26 | L | F | Hypothetical Cytosolic Protein |
| 349 | 350 | RXA03010 | 106 | G | S | hypothetical protein |
| 351 | 352 | RXA03029 | 6 | K | E | TRANSCRIPTIONAL REGULATOR |
| | | | 7 | P | A | TRANSCRIPTIONAL REGULATOR |
| | | | 8 | C | I | TRANSCRIPTIONAL REGULATOR |
| 353 | 354 | RXA03053 | 99 | M | I | hypothetical protein |
| 355 | 356 | RXA03098 | 164 | S | N | DNA alkylation repair enzyme |
| 357 | 358 | RXA03113 | 374 | P | L | INTEGRAL MEMBRANE PROTEIN WITH TRKA DOMAINS |
| 359 | 360 | RXA03184 | 109 | S | F | TRANSPORTER |
| 361 | 362 | RXA03316 | 6 | D | N | |
| 363 | 364 | RXA03343 | 171 | S | F | |
| 365 | 366 | RXA03377 | 55 | A | V | |
| 367 | 368 | RXA03463 | 53 | V | I | |
| 369 | 370 | RXA03506 | 80 | P | L | Hypothetical Cytosolic Protein |
| 371 | 372 | RXA03523 | 167 | A | T | |
| 373 | 374 | RXA03572 | 2 | P | L | |
| 375 | 376 | RXA03577 | 72 | A | T | |
| 377 | 378 | RXA03584 | 12 | S | F | |
| 379 | 380 | RXA03591 | 902 | S | F | |
| 381 | 382 | RXA03613 | 106 | S | Y | |
| 383 | 384 | RXA03682 | 18 | P | S | |
| 385 | 386 | RXA03700 | 139 | E | K | |
| | | | 269 | A | T | |
| 387 | 388 | RXA03803 | 44 | P | S | |
| 389 | 390 | RXA03823 | 20 | V | I | |
| 391 | 392 | RXA03886 | 23 | A | V | |
| 393 | 394 | RXA03940 | 86 | T | I | |
| 395 | 396 | RXA03947 | 81 | A | T | |
| | | | 84 | S | N | |
| 397 | 398 | RXA03955 | 126 | T | I | |
| 399 | 400 | RXA03975 | 55 | V | I | |
| 401 | 402 | RXA04007 | 145 | S | N | |
| 403 | 404 | RXA04075 | 66 | G | S | |
| | | | 173 | A | V | |
| 405 | 406 | RXA04085 | 55 | P | S | |
| 407 | 408 | RXA04092 | 18 | A | V | |
| 409 | 410 | RXA04095 | 30 | R | K | |
| 411 | 412 | RXA04101 | 40 | T | I | |
| 413 | 414 | RXA04169 | 21 | T | I | |
| 415 | 416 | RXA04172 | 46 | P | S | |
| 417 | 418 | RXA04181 | 40 | G | D | |
| 419 | 420 | RXA04319 | 40 | R | C | |
| 421 | 422 | RXA04337 | 19 | P | S | |
| 423 | 424 | RXA04352 | 2 | G | S | |
| 425 | 426 | RXA04354 | 50 | T | I | |
| 427 | 428 | RXA04370 | 102 | P | L | |
| 429 | 430 | RXA04548 | 85 | A | V | Hypothetical Cytosolic Protein |
| | | | 362 | P | L | Hypothetical Cytosolic Protein |
| 431 | 432 | RXA04549 | 214 | G | R | |
| 435 | 436 | RXA04642 | 112 | P | L | |
| 437 | 438 | RXA06004 | 148 | D | N | |
| 439 | 440 | RXA06040 | 58 | S | P | |
| | | | 59 | I | M | |
| | | | 93 | V | E | |

The application's sequence listing, which the Patent Office published only in electronic form, follows.

SEQUENCE LISTING (434 sequences)

SEQ ID NO: 1 - DNA, 1465 bp, Corynebacterium glutamicum
  CDS (101)..(1435): RXA00033
acacggatttaacgtgacggtttctcagtgtttttagcttctggcttttggcttctgatgctttagcgctggactcaacatttaaaacaaaggtgaacacatgtcagtacagcaaagcgggttgctcgaacgtctcggcattccccgacccttgattttcggatttatcggcctcaccatcttcatgatcggtgacggtgtcgaaaccaacattttggaacctttcctcagttccgaacatggtttcagcgtttccctcgcgggaaccctggtgactgtttacggtgttgccgtggcgatcgcagcattcttcgcggcggcactttcggacctgtggggtccacgaaaagtgatgatcctcggtgcttcaatctggatcgtctttgagctgatcttcctcaccgtggcactgaccaccgaccatacttggttgatcttccttgcttatggtctccgcggctttggttatccattcttcgcctacggattcttggtgtggatcaccgcaactgcctcacctaagcaattgggtaccggtgtgggttggttctacgttgccttctctgcaggtcttcctaccttgggtgcgctggttgccaccatttccatgcagtacgtgaacttgaccttctatgaaacgttgtgggtttccctcgtgctggtggtcatcggatcgctcatcgcactgctgggagtgaaggaacgtcgcggacgccacccactggttgccaaccccgacgatgtgaagcaaacacttggccagggcttcaaacttctgcgcaatgatcgacgtgcacgttttgtcacctacatccgcaccatcaactccattccgacctacgcgatggctgtgttcttcccatcatttttcactgacgatctgaagtggcagctaagctggttcctcatcctcaccactgtaatttacgcagtcaacctgccgttcaatcctttcttcggtagcttcggcgaccgccacggttgggcacgaactgtgttctggggcggatcaatcggtggcgcagtcaccctcgcgttggtttacttcattccgatgttcggcgttcaggctggcatgtccaacggtgtcgttttcggaatcaccatcgcagccggcgcactctttggtgtgtccctcgcgggcttcgtgccactttccgcaatcgctgtctcccttgatcccaagcaccccggcgcagcgatggccacatacaacctcggcgttggtggcgctgtagctgtgggaccgctcctggttgcagtcttccacccactgattggtccaaccggattgatcctggtcatgatcgccctctacctgctctccggttggatgactcttcaacttcgcggcacccaaccaggattcgacggagtgccagcacttgctgaagacgcccacatcgaagaccttgcagatgtaaacgcaaacgcctaactgtttttcgagctaaacccatccttg

SEQ ID NO: 2 - protein, 445 aa, Corynebacterium glutamicum
MSVQQSGLLERLGIPRPLIFGFIGLTIFMIGDGVETNILEPFLSSEHGFSVSLAGTLVTVYGVAVAIAAFFAAALSDLWGPRKVMILGASIWIVFELIFLTVALTTDHTWLIFLAYGLRGFGYPFFAYGFLVWITATASPKQLGTGVGWFYVAFSAGLPTLGALVATISMQYVNLTFYETLWVSLVLVVIGSLIALLGVKERRGRHPLVANPDDVKQTLGQGFKLLRNDRRARFVTYIRTINSIPTYAMAVFFPSFFTDDLKWQLSWFLILTTVIYAVNLPFNPFFGSFGDRHGWARTVFWGGSIGGAVTLALVYFIPMFGVQAGMSNGVVFGITIAAGALFGVSLAGFVPLSAIAVSLDPKHPGAAMATYNLGVGGAVAVGPLLVAVFHPLIGPTGLILVMIALYLLSGWMTLQLRGTQPGFDGVPALAEDAHIEDLADVNANA

SEQ ID NO: 3 - DNA, 3043 bp, Corynebacterium glutamicum
  CDS (101)..(3013): RXA00054
atgctgagatccgctgggtggcaccacacgaattggaatctttggagtgggcacctgctgatattcctgcggtgaaacttctcgtcgagcagcttgcttaatgagcccattcgattcaaagcttggtcgcgatacccattttggattcctcgataagaccactgcttcgcaacaactgctgaatccttcattgatttctaatgaggatccgcacaccatgttgcaggcgatcaagttagagcttcgtaccgcacagtcttttacattttcagtcgcttttatttccagtcgcggtatcgcgttgttgaaacaggcattgttggacttcaagggtaaaggacgaattatcacgtcccgctacctggatttcaatgatccaacgatgtttcgtgagcttcttactttggagaacgtggaagtcctcatacatcaaggcgatggtttccactccaagggctacgttttccatcacgacgtgggaatcaccgcagtagtgggtagttccaacctcacagataatgctctgttggtaaaccgggaatggaatctgaagttctctgccagcaagaatggcgacattgcttttcaacttgatgatgcgattaatcgccaaattgaacgatccacgccactgacgcctgaatggatctcagagtatgaggcaaccagacgtgtacctgagcgtttggtgtctcagaatattcctctcgaggatcaaagtaacgccggaacaattgttccaaacgtcatgcaggaagaggccctcgacgctctactttctttgacggagaagggagagaaacgtggtgtcattatttctgcgacaggaactggcaagactatcctggctgctctagctacaagaatgctcaagcctgaacgagttttgtttgtcgtgcaccgcgaacaaattctggataaggcgcgatccgagttcatcaaagttcttgaacgtcccgctgttgatttcggaaaaatgtctggctcgaccaaggagctagataagccgtttgtgtttggcaccatccaaacgctgacaaaggaagctacactttcccagatctcccctactgactttgatttagtcatcgtcgatgaagtccatcgcgccggtgccgaatcctatttggcattgctcaatcatctgcagccacagtttttattgggcctgactgctaccccagagcgaactgatggattcaatatttatgagttgttcgatttcaacgtgccatatgagatccgacttcaagctgctttagaatccaacatgctcgtaccgtttcactattacggtgtcacagacttcacgcttgattctgaaacaacggtgactgatacctccaaactaagtgccttggtgagcgaagagagagtccatcacattctggaggccctcaaaacttatggtcatccagaaaatgttcgtggactgatcttctgttccaagactgaagaggctgaggagctgtcaaaacttctcgaccagtcgttgtttaatggcagcttgcttaaaaccaaggcgctctctgcgaaggactcaattccctaccgcgaagaggttgtagctgagctggagtccggcgacctggactacatcttgacggttgacatcttcaatgaaggcattgatattccttcggtgaatcaaatcgtaatgattcgtagtactcaatcaagcattgtgtttacgcagcagctcgggcgtggactccgaaaagctgctggcaaagaccatctgcgcgttattgatttcattggcaactacgcgaacaactatctcattcccatcgcattgtttggcgataattctcgcaataagaacagcatcagacgccgcctgattgagagcgatattgatggaacaatctcaggtgtttcaagtgttaactttgatcccatcgcgcaggagagaatttttgctgcgttgaaggctgcgaagttggactcaaaagcacaattcaagcaggatattgttcagcttcaagatcgactcaatcatgtgccagcactgttagacttcgctcgcttcaatactgttgatccgtttatccttgccacgcattctggcaactactggtcgctgctcagttcagtgaagtttgtcgatcacgctcccagcgaatcggagaagtactttctggatttccttaccggagagcttcttaacggcaagcgacctcatgagctgttgctgatccaggaactaatgaaacagcctgaaacttctactgaagaattccgtaagctcttgcaggcccaatcgactagttcagatgagcaaacaatcaactcggttgaaaggattttgagccaagaattctatacgggaccaaaccgcaagaagtttggcgaacatccgatcctctctgttcaaaaccgcacctactcttttactcccgagttccgacgtgccctcgacgaaagcctagaagtgacggaccgagatgaggctgctcagaattttaagtttcacgtccaagacatcatcgacactggtttgtttatcgccagaaacaatggattttggcaaggaaacctcgttgttggcgagagatactcccgacgagatgtctgccgaattctcaattgggaacgaaacaacgagagcacgatttatggatacaaagtggacagttacacatctacttgcccaatctttgtgacctatcacaaggctgatgatgtatccgaaagtactcgttaccaggatgaactcgtcgatccgaatacccttcattggtattcccgcggcaaccgaaagatcacgtctaatgagatcaagcccatcgctgcgaatgctgtggatcttcatgtttttgtgaagaaggacgatgccgaaggccttgatttcttctaccttggtcaagcgcattcagaaaacagcaaacagtcatcgatgcccggaaacaaaggagttgtgcaaccggtggtcacaatggatctacagttcgacacacccgtcgaacaaagcctgtttgagtacctgagcacaaatctcgccgtaacggagtaaccaccgcaaccaagcgtcgaaaagcaa

SEQ ID NO: 4 - protein, 971 aa, Corynebacterium glutamicum
MSPFDSKLGRDTHFGFLDKTTASQQLLNPSLISNEDPHTMLQAIKLELRTAQSFTFSVAFISSRGIALLKQALLDFKGKGRIITSRYLDFNDPTMFRELLTLENVEVLIHQGDGFHSKGYVFHHDVGITAVVGSSNLTDNALLVNREWNLKFSASKNGDIAFQLDDAINRQIERSTPLTPEWISEYEATRRVPERLVSQNIPLEDQSNAGTIVPNVMQEEALDALLSLTEKGEKRGVIISATGTGKTILAALATRMLKPERVLFVVHREQILDKARSEFIKVLERPAVDFGKMSGSTKELDKPFVFGTIQTLTKEATLSQISPTDFDLVIVDEVHRAGAESYLALLNHLQPQFLLGLTATPERTDGFNIYELFDFNVPYEIRLQAALESNMLVPFHYYGVTDFTLDSETTVTDTSKLSALVSEERVHHILEALKTYGHPENVRGLIFCSKTEEAEELSKLLDQSLFNGSLLKTKALSAKDSIPYREEVVAELESGDLDYILTVDIFNEGIDIPSVNQIVMIRSTQSSIVFTQQLGRGLRKAAGKDHLRVIDFIGNYANNYLIPIALFGDNSRNKNSIRRRLIESDIDGTISGVSSVNFDPIAQERIFAALKAAKLDSKAQFKQDIVQLQDRLNHVPALLDFARFNTVDPFILATHSGNYWSLLSSVKFVDHAPSESEKYFLDFLTGELLNGKRPHELLLIQELMKQPETSTEEFRKLLQAQSTSSDEQTINSVERILSQEFYTGPNRKKFGEHPILSVQNRTYSFTPEFRRALDESLEVTDRDEAAQNFKFHVQDIIDTGLFIARNNGFWQGNLVVGERYSRRDVCRILNWERNNESTIYGYKVDSYTSTCPIFVTYHKADDVSESTRYQDELVDPNTLHWYSRGNRKITSNEIKPIAANAVDLHVFVKKDDAEGLDFFYLGQAHSENSKQSSMPGNKGVVQPVVTMDLQFDTPVEQSLFEYLSTNLAVTE

SEQ ID NO: 5 - DNA, 934 bp, Corynebacterium glutamicum
  CDS (101)..(904): RXA00056
caccacaggcttccggaagttgcacattggaaaaacccttagataaatattgaaatatgaatttaataatagattccgaacgaaatcggtgttagcgtctgtgctgaaacaatctaatcgcgtttcaggacacctacatgatcaggagctctttttgttaaacagagtcagtcgtattgcaggcgcttctgcaatcacactatgcatcggcttaaccacaatactaagccctacttccactgcacaaagcctcgaacagatcacccctttacctgaatctgcaatcgacctcaacgccgagattcacgtaaacacaagcgacatttcagctgaacagatccttggtgctcaagatgaaatcacaactatgtacgattctcatgacccctacgagtacttcgataccctcaccgacatcgaacagcgttcaataatagcagcgcttaaacgggatccgagttcactccaacaacgccaagaaacccgtctcgcggcacagtccgacccctacaaaatttacatatcaggcctcgaaatgctttcatgcatcaatctagttgatgttgtatcatgcgggattgcaaaccaagcagcaaccaaagcaaataatgaggctgtcgcacgatacccaggcgattcccttcgcaacggcaaaggcgatgcatttcggcattgctcatggaacgctctgatgacgatacgaatcgggagcaatggagctgaaagaattgcaacaaaccacgagacaatcggggacggtccggccgatgaaaatgcaatggacctattcaataatgcacaaggccgacagatcggagccggattcattaatagtaaggatgaaactagcgcgctcgcgatatgcgcgctgtggacaaatctcggtagactaaaaactctaaaataagcaaggtgccctctgatgctaaaaaag

SEQ ID NO: 6 - protein, 268 aa, Corynebacterium glutamicum
VLKQSNRVSGHLHDQELFLLNRVSRIAGASAITLCIGLTTILSPTSTAQSLEQITPLPESAIDLNAEIHVNTSDISAEQILGAQDEITTMYDSHDPYEYFDTLTDIEQRSIIAALKRDPSSLQQRQETRLAAQSDPYKIYISGLEMLSCINLVDVVSCGIANQAATKANNEAVARYPGDSLRNGKGDAFRHCSWNALMTIRIGSNGAERIATNHETIGDGPADENAMDLFNNAQGRQIGAGFINSKDETSALAICALWTNLGRLKTLK

SEQ ID NO: 7 - DNA, 760 bp, Corynebacterium glutamicum
  CDS (101)..(730): RXA00065
tggcaccgtcgctgcctccagttgaggaacttgaggttgccatggatggcgtggctacctgtgtgctgttggcagcagcggagcattacgctaactaaaagtgaatacagcggagacagcacattggattaaccgtctgcttcctgggacaccggaattccaccaggttggcgcgtttaaagtggcaggttacacgcttgaggatgaatcaattgcgtgttctgtcaatttcgggcgcgtcaacaccgggctggtcacggaaggcggcgcggaaacggtcgatgtgcgaagtgagattttgagcctggccagggccgacgtgtccgtgcctgggcgcgccgtcggcgctgctgcaacaatgcttctcgacgcctccctctccttcaaatccgccaccgattccagcgtcactcccatgcatgcccaaccgggacagatcttgccgtgcgtaggaattatggcgaatcttccccaagagggtttttctgtggtgcacggaattttggcggatccccgcatttggggcccggagattccgtatgttcgtgaagaagcaggtcaagtaaatgtggaagcacccgacgaggctggcgatctagcccgattgacgttgcctctgcagttgatcctgctcacggaggaagagtttgccatcgctctcaacgagggcagcgacgtcatgttcgaacgaatggcggagcaagaagtcgatcttctggatctgaaacgttaagacggtaggctcaattccgtggctttg

SEQ ID NO: 8 - protein, 210 aa, Corynebacterium glutamicum
VNTAETAHWINRLLPGTPEFHQVGAFKVAGYTLEDESIACSVNFGRVNTGLVTEGGAETVDVRSEILSLARADVSVPGRAVGAAATMLLDASLSFKSATDSSVTPMHAQPGQILPCVGIMANLPQEGFSVVHGILADPRIWGPEIPYVREEAGQVNVEAPDEAGDLARLTLPLQLILLTEEEFAIALNEGSDVMFERMAEQEVDLLDLKR

SEQ ID NO: 9 - DNA, 712 bp, Corynebacterium glutamicum
  CDS (101)..(682): RXA00068
ggctgctaaacggcaaccaatagagcgataattcgctaaggcgaatgtaatcgcagcaacatatagcaccggcttaacaggccggtgctattctgttcgcatgacttcgaaggatctgattgtgacctcctatacgtcttggggcaagcgtttcaagaatgacgggaagctttttattaacctacttcgcagcaccactgatagtgctgatgaaaaggttttagccactttcggtgaagttcccagcaaatcatttgaaaccaccgcaacggttgatgagcagcagtgggaactgtccttcagtattgatggaacggcaactgccaagcttcctgatggtcgtgtgttcagcgcgaatgcaggtgagaagacctttaccaagtccaagcggattgaaatcgacatggacggcaccgcgatggctgctgttaatgaagataaaaacaattggattatcgacgattctgaagagaataaagtcgctcagtttaccggtatgaacaacggtgtgcgtcgcgcgattgtggagtttgagcctgacgtagaagtcacccaggagcaggaaattttcttgtcgtgggttgctcggaaaactctggaatcccgcatgttgggctccagttggggactgactctgtttttgatcattttgacgccaatcattattttcctcactttcagctaaaaggaccatgcaatggtagacgctcag

SEQ ID NO: 10 - protein, 194 aa, Corynebacterium glutamicum
MTSKDLIVTSYTSWGKRFKNDGKLFINLLRSTTDSADEKVLATFGEVPSKSFETTATVDEQQWELSFSIDGTATAKLPDGRVFSANAGEKTFTKSKRIEIDMDGTAMAAVNEDKNNWIIDDSEENKVAQFTGMNNGVRRAIVEFEPDVEVTQEQEIFLSWVARKTLESRMLGSSWGLTLFLIILTPIIIFLTFS

SEQ ID NO: 11 - DNA, 1492 bp, Corynebacterium glutamicum
  CDS (101)..(1462): RXA00077
ctaaattgttttaacgcgtgaagcagtccccgcccgatttattcgaggcggggactttcgctttccgggataaaaattgcaacgcactacactgagcagtatgaatgatgagaatattcaaagctccaactatcagccattcccgagttttgacgattggaaacagatcgaggtgtcgctcttagatgtcatcgaatcctcacgccatttttctgatttgaaagatagcactgatcgttctgcgttagatgctgcgctagagagagcaaaaagagctgccgcagttgataccaatgccatagaaggaatcttccaaactgatcgcggttttacccatacagttgcaacgcaggtaggggcttgggagcaacaaatggcgatgaaaggcaaacatgttaagcctgcgtttgacgatactctagaaggctttgagtatgttctcgatgcagtaactggtagaactccaatctctcagcaatggattagaaatttgcacgccgtcattctgcggagccaagaaagccacgaggtttttacagccgttggagtccaaaatcaggcgcttcagaaaggcgagtataaaactcagccaaatagtccacagcgctcagatggatctgtacatgcatacgccccagttgaagatactcctgctgaaatggctagatttatttcagaacttgaatctaaggaattcttagcagccgagaaggttattcaagctgcctatgcccactatgctttcgtatgtattcatccttttgcagatgggaatggacgagttgcacgagccttggctagtgtttttctatacaaagatcctggtgtccctctcgtaatctaccaagatcaacgcagagattacatccatgctctagaagcagcggacaagaataacccgctcctgctgattagattctttgctgaacgagtgaccgatactattaactctattatcgttgatctcactaccccgatcgcgggtaaatctggttcggctaagctttcggatgcgctacgccccactcgcgtattaccagaattacatgatgctgcacataggctccaagaaagtttatttacagaaatccgatctcgattggatgaagaaggaaaaaggaatgggttggagtttctacttcaacggatttttatcggttccccattcaatctgccagagggctataacgctttccctgatagctattgtctgaccttagctttcaatagcaactctccaaaacaaatcttccacccgctatccatagtaatagcagctcgagatgggaaaagagcgagcagcgacctcgtggcagctacttctattggatacaactttcacgcttacggacgtgaagtcgagcctgttgttactgaaagctttcgagaacgtgtgaaaatttacgccgacgggattgtagatcacttcttaaccgaactggctaaaaagtttcaacagaattaattagcctatctcggctttcgccttccg

SEQ ID NO: 12 - protein, 454 aa, Corynebacterium glutamicum
MNDENIQSSNYQPFPSFDDWKQIEVSLLDVIESSRHFSDLKDSTDRSALDAALERAKRAAAVDTNAIEGIFQTDRGFTHTVATQVGAWEQQMAMKGKHVKPAFDDTLEGFEYVLDAVTGRTPISQQWIRNLHAVILRSQESHEVFTAVGVQNQALQKGEYKTQPNSPQRSDGSVHAYAPVEDTPAEMARFISELESKEFLAAEKVIQAAYAHYAFVCIHPFADGNGRVARALASVFLYKDPGVPLVIYQDQRRDYIHALEAADKNNPLLLIRFFAERVTDTINSIIVDLTTPIAGKSGSAKLSDALRPTRVLPELHDAAHRLQESLFTEIRSRLDEEGKRNGLEFLLQRIFIGSPFNLPEGYNAFPDSYCLTLAFNSNSPKQIFHPLSIVIAARDGKRASSDLVAATSIGYNFHAYGREVEPVVTESFRERVKIYADGIVDHFLTELAKKFQQN

SEQ ID NO: 13 - DNA, 1660 bp, Corynebacterium glutamicum
  CDS (101)..(1630): RXA00080
atgttcttgtttccctcatgatgagctccgtggtctacctcgcattcgatgtgggcttgggacttaatcttccttccggacttttgggtggtggcttttaatggatattttgtccctcttgatggaaggtttcgccggcgcgctaacgccgatgaacctcctctgggtgattgtcggctgtttgctcggcaccgcggttggcgtcatgcctggtcttggatcctccatggctgtggcgctgctgctgccaatgaccttcgcgcttgatccaactgccgcgttcattatgttctctggcgtatatttcggtggtctcttcggtgactccacgatggcaattttgatgaacaccccaggtcaggcatcggcaatcgcctcaacattcgagggccaccgcatggctcttaacggccgtgcgccacaggctctggctaccgcagcgatcggtgccttcatcggcggtatcgtctcctccttcatcgtggtcttcctcgcaccaaccctggcggaactgtccaccgcattcggccccgccgagtacttcgcactggcactcttcgcgttcgtcgccacctcctccgtggtgtccgactccgtgtttaagggacttgcgtccctcattttcggcctcggcattgcgaccatcggcatcgattcggtcaccggcatcgagcgcttcacgctcggggcaccgcagcttttcgacggaatttccctcgttactgttaccgtcgcgattttggcactgggagaagtgttttacattgcagcccgcgcacgccgtgacaaagcaaatctggagacgcgctctgcaggccgtccgtggcttaccggaacggaattcaaagaagccgctccagcctgggcacgcggaaccatcattggtctgcctttcggtgtgatccctgttggtggatctgaagttccaaccttcttggcttactccaccgagcgcgcattggataaacgacgcaaagatccgcagttcggcgataaaggtgcaatccgaggactcgctgctcctgaagctgcaggtaacgccaccacaggcatggcgatgggcgctcttcttgccctgggtctcccagtctctgcaactgcggccatcatgttggcagcgttccgccagtacggaatccagcccggaccactactcttcgatcgcaaccctgaacttgtctgggcacttcttgccagcttcttcatcgcgatgatcgtcctgctgttcatcaacctgccgttcgcacagctgtgggcaaagctcctgctcattccaaaccactacctctactccggcatcgcattgttctgtggcctgggcatttacgccacctccggcgcagtgttcgacctgctcatgctgctcggcatcggtgtcgtggctttgatcatgcgtcgctacggttacccgctggcaccgctgatgatcggtatggttcttggacctttggctgaaacctccctccgcgacgcactactgtcctcggttggcgatttctccatcctcgtctccagccccatcacctggtccctctacgcagtgctcgccatcttcatcgcggtcagtgtcatcactgcaatccgcggtcgtcgcaagcacctgacttctcagctcgaaaccatcgacgcttaaagtccccgtatagaaacaggcaaaccg

SEQ ID NO: 14 - protein, 510 aa, Corynebacterium glutamicum
MDILSLLMEGFAGALTPMNLLWVIVGCLLGTAVGVMPGLGSSMAVALLLPMTFALDPTAAFIMFSGVYFGGLFGDSTMAILMNTPGQASAIASTFEGHRMALNGRAPQALATAAIGAFIGGIVSSFIVVFLAPTLAELSTAFGPAEYFALALFAFVATSSVVSDSVFKGLASLIFGLGIATIGIDSVTGIERFTLGAPQLFDGISLVTVTVAILALGEVFYIAARARRDKANLETRSAGRPWLTGTEFKEAAPAWARGTIIGLPFGVIPVGGSEVPTFLAYSTERALDKRRKDPQFGDKGAIRGLAAPEAAGNATTGMAMGALLALGLPVSATAAIMLAAFRQYGIQPGPLLFDRNPELVWALLASFFIAMIVLLFINLPFAQLWAKLLLIPNHYLYSGIALFCGLGIYATSGAVFDLLMLLGIGVVALIMRRYGYPLAPLMIGMVLGPLAETSLRDALLSSVGDFSILVSSPITWSLYAVLAIFIAVSVITAIRGRRKHLTSQLETIDA

SEQ ID NO: 15 - DNA, 679 bp, Corynebacterium glutamicum
  CDS (101)..(649): RXA00110
atatcgaatgtccagtcacgctaaacttcacccaagatgagatttcgtggcacgattgggaataacgaacgctaattttaaacactggaggagcttccacgtgagcaacaaagacggcctttttactgacggtaacagcacgtttgcacctaaggtggattcaattcccctcagcgatgtggataccagcgttagcggtgaagcctccatcggcacgctgatctccaacgcaacctcccaaatgtccagccttttccgcgcagaagttgagctggcgaagactgaactcgcaggcgaagccaagaaagctgccatcggcggcggcgcattcagcgttgctggcgtaatcgcactgtacagctccttcttctttttcttcttcgtcgcagcactgctgagcgagtggattaagccttgggcagcattcctcatcgtgttcctcttcatgctggtcatcgccgcagctctcgcactgttcggctggcgcaaggtgaagaagatgggcgctccgaagaacaccatccaatcggtcaaccaactgaagaacctggtcccaggtcaggcatccgagaagctggagaaggccaacaagcgtggcctctacacctccgcgtccttccacagccccggcgccatcactggcgaccactaaaaaaggagacttcgatggcctttttta

SEQ ID NO: 16 - protein, 183 aa, Corynebacterium glutamicum
VSNKDGLFTDGNSTFAPKVDSIPLSDVDTSVSGEASIGTLISNATSQMSSLFRAEVELAKTELAGEAKKAAIGGGAFSVAGVIALYSSFFFFFFVAALLSEWIKPWAAFLIVFLFMLVIAAALALFGWRKVKKMGAPKNTIQSVNQLKNLVPGQASEKLEKANKRGLYTSASFHSPGAITGDH

SEQ ID NO: 17 - DNA, 469 bp, Corynebacterium glutamicum
  CDS (101)..(439): RXA00118
cgatccacgattttagagtctgtgcatctacggaagtaatcggttgagcggaagtcataccttgtccttttcaatctcaaagtgatgggcgattccaagtgtgccatataccctggggggtattcaagataggggtgggggtatactgtgggatcaacgttccagggcaacaaaaggagaaaaaatgcaactcaatcctgatgagatcaccccagtgctcaaccgactcaagcgcgcccaaggtcaactcaccggagtaatccgaatgcttgatgaaggcgaagactgtaaagccgtagtcacccaacttgccgcagtcacaaaagcgctggacagggcaggcttcgccatcattgccacaggtttggaacagtgcctcaccaaccctgatggcgacatggacaaaaaggaactagaaaaactgttcctgtcgctggcttaactatggcctagttcagggcgtttgggt

SEQ ID NO: 18 - protein, 113 aa, Corynebacterium glutamicum
VPYTLGGIQDRGGGILWDQRSRATKGEKMQLNPDEITPVLNRLKRAQGQLTGVIRMLDEGEDCKAVVTQLAAVTKALDRAGFAIIATGLEQCLTNPDGDMDKKELEKLFLSLA

SEQ ID NO: 19 - DNA, 841 bp, Corynebacterium glutamicum
  CDS (101)..(811): RXA00121
gatgtccaaatactgcgaaaccatcgaagcgtttcacaaccgtccggcatcagctttcggcgctgtcgaccccatcttctaaacaagaaaggcccctccaatgttgagcgatctgagctccatttttgacttccaagacctctccggcaccttctctgtcgtcgacgttctcatcactttggtcttgtccttcgtcctgacctccatcgtgggtgtggtgtaccaaaagacccaccgccacatctcctacagccagtcattcgtacaaacgttggtgctggtgggaatggtcattgcaatcatcatgctggtggtcggctccaacattgcacgtgcattcgccctggttggcgcgctttcggtgattcgattccgcaacgcagtgaaagaaacccgagatgtgggcttccttttccttgccatggcaatcggcatgacttgcggtacccgcttctacgttctggcgatcgctgcaaccatcgttgtctgtggcgttctgttcatcatgtaccgcttcgactggttcaaggctgatatccagcgccaggtcatcaaggtgcaggtcccagccgatggacaagctgattccggcaggtcctacgcagaagaagttgaactgatcctcgcacagtactgcacttcctttgagatgatgtccgctgaatctgtccgcggcggagccctgaccgagttctcctacaccgctcaaatgcgcaagaacgtgaagccacatgagctggtcgccaagatgcgcgatgtgaactacggccaaaaagcgactgtcctgaccggtcacgatcaaacggatgtatagaaaatgcctagctttaaatctgctcga

SEQ ID NO: 20 - protein, 237 aa, Corynebacterium glutamicum
MLSDLSSIFDFQDLSGTFSVVDVLITLVLSFVLTSIVGVVYQKTHRHISYSQSFVQTLVLVGMVIAIIMLVVGSNIARAFALVGALSVIRFRNAVKETRDVGFLFLAMAIGMTCGTRFYVLAIAATIVVCGVLFIMYRFDWFKADIQRQVIKVQVPADGQADSGRSYAEEVELILAQYCTSFEMMSAESVRGGALTEFSYTAQMRKNVKPHELVAKMRDVNYGQKATVLTGHDQTDV

SEQ ID NO: 21 - DNA, 904 bp, Corynebacterium glutamicum
  CDS (101)..(874): RXA00150
agctgagcagggatcggcactagcttctactacgataacgagaactttgtttcaatacattcaaaatggcggaatattttgatcacgggggtgcaactgtatggtgttttctatgcatgacaaaggtgagacccaggagaatcctgcggacatgtcaggacgcctaaacacaccaatttccacggtctttcacttctttagctcacttttccatgacgctctgcgcagtgttgcccagtggagtgcgtggaagaaaatcgctgtatcggttgtcatcgtcgcaattatttccgtaacttttcttgtcgatgtccccccgatttcggtttatcgtgactgggcaaacaacgccggcgacgcttttgtcttagttttttgcgccttttatatcctcattactcagttccctatcccccgcacagttctcacactggcctccggcgtgctgttcgggccggttcttggatcagtcgtggcgctgggttccaccacagtgtcagcggtaatctcgctcctcattgttcggggtctgcttggcgattggatggcgccacgtttaacgcaccccgcagtctcacgcatcaatacccgacttgagcaacgtggatggctggcgattacctctttaagaatgatcgccgctatccccttttccatcctcaactatgttgcagccttgactagcgttcctgttttttcttttgccatcgctaccttgatcggatctgcaccaggaaccatcgtcaccgtcgttttgggagatgcagtcacaggttctggaaactggactgccgttgcattcacggtatttttagcgattttgggtgttttaggtatctttttagatcaaaagatgccagtcaagcctggaaagtagacaatataaggtagggttggagaagat

SEQ ID NO: 22 - protein, 258 aa, Corynebacterium glutamicum
MVFSMHDKGETQENPADMSGRLNTPISTVFHFFSSLFHDALRSVAQWSAWKKIAVSVVIVAIISVTFLVDVPPISVYRDWANNAGDAFVLVFCAFYILITQFPIPRTVLTLASGVLFGPVLGSVVALGSTTVSAVISLLIVRGLLGDWMAPRLTHPAVSRINTRLEQRGWLAITSLRMIAAIPFSILNYVAALTSVPVFSFAIATLIGSAPGTIVTVVLGDAVTGSGNWTAVAFTVFLAILGVLGIFLDQKMPVKPGK

SEQ ID NO: 23 - DNA, 727 bp, Corynebacterium glutamicum
  CDS (101)..(697): RXA00151
aagtagacaatataaggtagggttggagaagattctttacttcttcactcattcgccctgacagcgaatccactacaataaacaaagggggcagccacccatgtgggcactgcatgccagataccgcggccgagacacacgacgagccgaattggttaaaagatttgcagaagctttgtccaccctcgaaggtgctggccagtttgaagtcattggtgtcgaagacatccgagcacacatcacctcaccgttaaccacatgtgatgttgtcatggcgctactcgcagctggcgattgggcaatcggaattggtgttatccccaccgttgacggaacagtcgatgaatcggatgaggccatcatcgaacaggtaaagaaaatttcctctgatgctctgcgccccaccgccaaggcgggaacggtcaaagttaggatcgccggaaccaaacgggacaatactcaagccttcaacatctccgctgcattcacgttgattgggcaagttctgtcaaagcgcaccatcgaaggacgcgaagccaccgcactcgtccgttctggactgaatcaaaatgaggcagcccaagagctcggtatttccaagcaggcaatgtcgcagcgattgcaggcggcaggttggcaggcggaatctgctggttggcaattggccgtaaacctcatcgagcaggctggcaagcgctagcaggcgatttaagagcctgagtttgtg

SEQ ID NO: 24 - protein, 199 aa, Corynebacterium glutamicum
MWALHARYRGRDTRRAELVKRFAEALSTLEGAGQFEVIGVEDIRAHITSPLTTCDVVMALLAAGDWAIGIGVIPTVDGTVDESDEAIIEQVKKISSDALRPTAKAGTVKVRIAGTKRDNTQAFNISAAFTLIGQVLSKRTIEGREATALVRSGLNQNEAAQELGISKQAMSQRLQAAGWQAESAGWQLAVNLIEQAGKR

SEQ ID NO: 25 - DNA, 913 bp, Corynebacterium glutamicum
  CDS (101)..(883): RXA00155
gttgcgggagtgtccaccaaaaatattgcctgcataggggtctgaaaaactcatagctcaccaccctagtcaaagcactgcactacacttccctaacactatggaaattcgagcaaacgtttattcaccgcttcaaaatactgccgtctggctaggtgcgtggctctatgaattagtgcccaccgaagatgtcatcgatgcgttcgtcgatctcggcggcccgcacaccttcggcgacggcgggctgctcgatatgctgcgaactttaaaagaattaacaagcacgcttatcgacgcccccttccacggtccgattttaactctcgcactcagcggcccaggccaagtgccggcgttgccggcaggttcacgcgctgcggtcttggcctccgcctcgaaggagggggcgttggtgctgggcggcgtcgataagcagcattcttgggcgcttattcctacgcgcggtaaggatgccactgagtggaatttggtggaggtggagggctttttgccggcgattgcgactgtctcgcccggtgaggcggatcagctgctccgtcaggcgacagatcaggcggcaaatatcattgagttaagtggctacgcttcacttgcgccgaaatctttgaagaatccgcgactaaccgtgggcatgctgtcagatttttacgacaccccggggcttccctatgcagtcccagagaggtcggcgaagctttttgcgcgcgcagatcgcgtggctgccatcgcagagaccgtgcaggaaaccatcggcgatcacagcctggatccacagttgattttcctgtggagccatattcggaccgcgcgcatggctggggtgagttatgccctcgcagagtttgcgagggactatcactcctagttggcagctggcgccgctgagcgagcg

SEQ ID NO: 26 - protein, 261 aa, Corynebacterium glutamicum
MEIRANVYSPLQNTAVWLGAWLYELVPTEDVIDAFVDLGGPHTFGDGGLLDMLRTLKELTSTLIDAPFHGPILTLALSGPGQVPALPAGSRAAVLASASKEGALVLGGVDKQHSWALIPTRGKDATEWNLVEVEGFLPAIATVSPGEADQLLRQATDQAANIIELSGYASLAPKSLKNPRLTVGMLSDFYDTPGLPYAVPERSAKLFARADRVAAIAETVQETIGDHSLDPQLIFLWSHIRTARMAGVSYALAEFARDYHS

SEQ ID NO: 27 - DNA, 2758 bp, Corynebacterium glutamicum
  CDS (101)..(2728): RXA00185
attgcgagagctcgctgactctgtggtcaatggtgcagcgccggaagaagaccgcgatgcgctcaacctattgttccgactaagccgggaggtctaagacatgcgtattcatgaaatcatcattgacaatttccgagccatcgaacatctagaacttcgtgacattcctgaccagggcgttatcgtgatccacggtgacaatgagcaaggcaaatcttcaatccttgaagccataaaaacagttctgaatagtaaacacagaaccaccagcaagacgatcaaggccattcagcctgttgaccgtgatgttcccatcagcatcaccctcgaggcaaccgtaggcacggttcgattccgcatacacaaacgcttcctaaaatccacagccgcagaactgcaagtcatcgagccacgtccatccaaccaccgtggactagaagccgaagctgcactggcagaaatactggaaagccatttggacacctctttgcttgacgcattgtttatgaaacagggtgaagtagaagcaggtatcagcgctgtaggaattcctaccctgaccagcgctttgaacgctcaaaatggcaataccgaagatgccaccgaagacaccgcactcatggaggctgtagaaaaggaatacctaaagttctacaccaactccggaaaggcgaatacgaggttcctacagttttccaaacaggtggaaacccttcgtactgatttggatgaggctaacgctgaagtagcaaagctctcctcccatgttgaccgagttaaacgattggaaattgatcgggatcaggccacagcacagttacccaaggcagaggaagaactcgcagggaggaaagcagaactggaggaagcccaaaaggttaaggctcaagccacggaaatccttgcgcagttttcccgggcggaagaacagttagagcaggcaacaggagctcagaaacgacgtaaagaactccgcaataagctggaattagcacagacagaagtcgaaaaggctgaagcagggcaagagaacctggcgcaagaagcttcccgtgaagcagaagaattcctagccttaagtgaaaagttcgaggcagcgcgcgcagctgaaactctggccgttgaaaaggtgaaagcagcacgtcaatcggttgctggaatcaaaaaccgtgaccgtaaagaacacctcacggttatgcttggtgaacttgatcgaattgggcagcgcctctacgaattgcgcagcgtccagcactcatcggtgcgtgtgagccagcgtgatattgatgctctgcaaaaggcgatcaccgaggtcgatatccaaaggacgctcgttgaagcgcagcagggaagtattaccctcagtgcttccacacccaccgacattcaactaggtgatgacaccgtttcagctaccgacgctggaaccacagttgccctcgaccgagaactcaccgtcgtggtcggcgatgtcaccttggtgattaacccaggaaaaacagcagcggaaagtcgcaccgattttgaatccgccgaggcagcattggcggagctgcttgatcaactcgacgtctcagacttggaccagctcagggaacgtttcactgcccaagagcaacgagacgcggatattgcagaactggttcgcgaacaacagcgcatgagcggtgggacagaaacaacagttttacgtgccgagctagaaggcctgcacgtcccagaggatctagacccatcaatttctgtggatgatgcgcaaactcagttgaatgaggcagaagagtccagagagctcgctgcggaggcgcataaacacgcaaatgcagcacttgatggattgcgttcgcgtcccgtagataaagctctgacagttttcaacgctcagctcgcagcactgcagagaaacctctcttccgcacaagttgaattagaccgtgcagtggcagaaacctcggatgacgaagttgatgctgctgtacagcggtgcgctgaagctctagctggggtgcgggtacagaagcaggagattgaacaggtcttggcaaaaaccaacccagacatggctcaacgcttatgtgatgctgctgaagcaaatgtgcgatcgtataaaacggcagtgtctgatgccaccacagagttggtgcgcctggaaggcctcatcggtgtagctgcaggtgcgaaagaacgactagataaagttaagtctgcgctgacagcagctgaaaaccggtttgaatcagaacaacgtcgcgcccacgctgcacgtcgcctctatgccctcatggtgttctaccgtgatgaatcccgaaagcgctacgcagcacccttcgcggacaaactatccaggctggcagcatccgtatttggagaatcagcagactttgatcttgatgatgagctgaagatctccagtcgttccataggaccacgaacagtggaccttgccaatctttctggcggcgcaaaggaacagctggcaatcctcacccgctttgctatcgcagaattggtagcagaatcctccgcgcaaggtgctgtgcctgtgtttattgatgatgcattggggagcacagacccagagcgactgacccgcatatctactctgtttagtgatgcaggcaaggactctcaggtgtttgttctcacctgtgttccagaccggtacaactatgtagaggtcacccaaaagcacagcatcgagtcattgaaaactgccaacgctctgctgtagctgagcaaaaagccaagcaagtagctg

SEQ ID NO: 28 - protein, 876 aa, Corynebacterium glutamicum
MRIHEIIIDNFRAIEHLELRDIPDQGVIVIHGDNEQGKSSILEAIKTVLNSKHRTTSKTIKAIQPVDRDVPISITLEATVGTVRFRIHKRFLKSTAAELQVIEPRPSNHRGLEAEAALAEILESHLDTSLLDALFMKQGEVEAGISAVGIPTLTSALNAQNGNTEDATEDTALMEAVEKEYLKFYTNSGKANTRFLQFSKQVETLRTDLDEANAEVAKLSSHVDRVKRLEIDRDQATAQLPKAEEELAGRKAELEEAQKVKAQATEILAQFSRAEEQLEQATGAQKRRKELRNKLELAQTEVEKAEAGQENLAQEASREAEEFLALSEKFEAARAAETLAVEKVKAARQSVAGIKNRDRKEHLTVMLGELDRIGQRLYELRSVQHSSVRVSQRDIDALQKAITEVDIQRTLVEAQQGSITLSASTPTDIQLGDDTVSATDAGTTVALDRELTVVVGDVTLVINPGKTAAESRTDFESAEAALAELLDQLDVSDLDQLRERFTAQEQRDADIAELVREQQRMSGGTETTVLRAELEGLHVPEDLDPSISVDDAQTQLNEAEESRELAAEAHKHANAALDGLRSRPVDKALTVFNAQLAALQRNLSSAQVELDRAVAETSDDEVDAAVQRCAEALAGVRVQKQEIEQVLAKTNPDMAQRLCDAAEANVRSYKTAVSDATTELVRLEGLIGVAAGAKERLDKVKSALTAAENRFESEQRRAHAARRLYALMVFYRDESRKRYAAPFADKLSRLAASVFGESADFDLDDELKISSRSIGPRTVDLANLSGGAKEQLAILTRFAIAELVAESSAQGAVPVFIDDALGSTDPERLTRISTLFSDAGKDSQVFVLTCVPDRYNYVEVTQKHSIESLKTANALL

SEQ ID NO: 29 - DNA, 1342 bp, Corynebacterium glutamicum
  CDS (101)..(1312): RXA00197
gtcgatgatattttggcaaccgaatctgaggcacgcgcgcgtgcgaatgctttgatcaaccggttggcaaccaacttgtaagctaaggagcttccgcctcgtggcagcctatcttcttggtgtcgtattatttttcctcggcatcgcagtaaccatcgcgcttcacgagtgggggcacttcatcacagcgcgcattttcggaatgaaagtgcggcgtttcttcatcggtttcggcccgacggtgtttgccaaaagacgcggcgaaaccgtgtacggccttaaagcgattccggtcggcggtttttgtgacatcgcggggatgactgcccaagatgaacttgatccggaagacctgccgcgcgccatgtatctaaagccctggtggcagcgcataattgtgctttccggcggcgtgatcatgaatctgatcgtcggctttttggtgctttacggcgtggcggtgagctccggaatcccgaatccggatgtggataccaccgcgacagtcgacaccgttcagtgcgtgccggaaacccaaatttccgcaactgaactgtcctcctgcgtaggttcaggcccagcgggcgacgccggcattgagcacggcgataagattttggccgtcaacggccaagagatggcaagcttcaccgccatccgcgatgcgatcctcgagctcccaggcgaaacggcaacgctgacgattgaacgggagggaacgcttttcgacgtcgacctccaggttgcctctgtcacccgtctcgcctctgacggttcagaaattaccgtcggcgcggtgggcatgtcgagccttccaccgaccgatgtgtacaaaaaatacggcccaatcgagggtgtgggagcaactgcacgtttcaccggcgacatgatcagcgccacgtgggatggcctcaaagccttcccggcgaaaatcccaggggtcgtcgcatccatcttcggtgcagaacgagatgtagaaagccccatgagtgtggtgggcgcgtcacgcatcggcggcgaatttgtcgaacgttccatgtgggacatgttcatgatgatgctggccagcctgaacttcttcctcgcgctgtttaacctcgtgccgctgccaccacttgatggcggacacattgccgtggtgatctatgaaaaaatccgcgacttcttccgcaaactgcgcggaaaaccagcgggcggcccagcggattacaccaaactaatgcccgtcaccgtagctgtcgcagccttgctgatgacagtgggaggcctggtcattgtcgccgatgtggtcaatcccatccgactctttggctaacgatacggaattgaactgccggcaccg

SEQ ID NO: 30 - protein, 404 aa, Corynebacterium glutamicum
VAAYLLGVVLFFLGIAVTIALHEWGHFITARIFGMKVRRFFIGFGPTVFAKRRGETVYGLKAIPVGGFCDIAGMTAQDELDPEDLPRAMYLKPWWQRIIVLSGGVIMNLIVGFLVLYGVAVSSGIPNPDVDTTATVDTVQCVPETQISATELSSCVGSGPAGDAGIEHGDKILAVNGQEMASFTAIRDAILELPGETATLTIEREGTLFDVDLQVASVTRLASDGSEITVGAVGMSSLPPTDVYKKYGPIEGVGATARFTGDMISATWDGLKAFPAKIPGVVASIFGAERDVESPMSVVGASRIGGEFVERSMWDMFMMMLASLNFFLALFNLVPLPPLDGGHIAVVIYEKIRDFFRKLRGKPAGGPADYTKLMPVTVAVAALLMTVGGLVIVADVVNPIRLFG

SEQ ID NO: 31 - DNA, 1615 bp, Corynebacterium glutamicum
  CDS (101)..(1585): RXA00199
agtcagatcgcgcactcaattagtcgcccgggtttatcgcgcggaaatttcctgattagtatccttacccagcaccattttttgtggtttgctctaagttatgggcgaatcagtaagtactgacaggtacactccgcagcagcgcacgcgttatcgccagctgctcatggaagatcttgagatttttgatcggcatttgcagcattccgattttgaggatcagggttccatcggcctcgagttggaactcaacctcgtggataagcatatgcaacctgctttggcaggccacgcggtgctttcccatttagacgatgagtaccagtcggagatcggtaactttaatgttgaaatgaaccacccgccactatccgttaaaggcgatgctttacgacgcctcgagcaaggcatcacctcgcgtctaggtcgcgtgcgcgcggccgccacatcggagaacgtgaacgtggcgatgatcggcacgctgcccaccatcaccccagaattcctcgaagatccggcatggatgacccaagaaaaccgctaccgtgcgctgagcaatgcggtgatggaatcgcgtggcgagttagtgcacatcaacatcgccgaccgtgaacaaatcatccacgatttcactgatctcgcccccgaatcaacttgcacgtctattcagttgcacctgcaattagcacccaataagtttgctgcagcgtggaatgcgtcgcaagcaatagctggtgttcaagcagctctttccgccaactccccacttttcctaggccgtcgggtgtggcatgaaagccgcattccagtgtttcaacaagctatcgatacgcgtactcctgaacttgtgaatcaaggagtccgccccagagtatggttcggcgaacgatggatcaccagtgtttttgatcttttcgaagaaaacgtacgctacttctcccctctcatcgcagaatcccgcgccctgtctggcacaccaatgatgaagggaaaatcccccgcactccactacctcaatctccacaacggaacggtgtggcgctggaaccgacccatttacgcaccgggggaagagcgctctcatctgcgtttggaaaaccgtctcctacctgcaggtcccacccccatcgacatcaccgccgatgccgctttctactacggtttggttaaatatctggccgaggaaaaccgccctgtctggtcacgtctcctattccctgatgcggaaaagaacttccaatccggtgcacgttcagggctgttcgcccgcatgacctggccaaccctcggacaagtcaacgttgcgaatctggtccaagagcacctcatccctcaagccagaatcggactggaacgactcgaagtaaacaaagaccttatcgaccaatacctgggcatcatcaccgaacgcgcgaagtcccgccaaaacggtgccacctggcagttgcgtagcctcaacaagctggaagcacacggaagcatgccgggttccgatgctcgaaaagcaggtcttgcagcaatgttgcaacagtatttacagaatcaagaaagcggccaacctgtccacacatgggctattggttcgtaaaacggcaaggaaagataatacccggaa

SEQ ID NO: 32 - protein, 495 aa, Corynebacterium glutamicum
MGESVSTDRYTPQQRTRYRQLLMEDLEIFDRHLQHSDFEDQGSIGLELELNLVDKHMQPALAGHAVLSHLDDEYQSEIGNFNVEMNHPPLSVKGDALRRLEQGITSRLGRVRAAATSENVNVAMIGTLPTITPEFLEDPAWMTQENRYRALSNAVMESRGELVHINIADREQIIHDFTDLAPESTCTSIQLHLQLAPNKFAAAWNASQAIAGVQAALSANSPLFLGRRVWHESRIPVFQQAIDTRTPELVNQGVRPRVWFGERWITSVFDLFEENVRYFSPLIAESRALSGTPMMKGKSPALHYLNLHNGTVWRWNRPIYAPGEERSHLRLENRLLPAGPTPIDITADAAFYYGLVKYLAEENRPVWSRLLFPDAEKNFQSGARSGLFARMTWPTLGQVNVANLVQEHLIPQARIGLERLEVNKDLIDQYLGIITERAKSRQNGATWQLRSLNKLEAHGSMPGSDARKAGLAAMLQQYLQNQESGQPVHTWAIGS

SEQ ID NO: 33 - DNA, 793 bp, Corynebacterium glutamicum
  CDS (101)..(763): RXA00211
tgagccaaaatcaataaggtgtttttcagcctgaggtaaaaatacggtggtactgtcgaaaccaatcatcccctagttttgaaaagaaggaagcgagccaatgtcattcctgatccgcgtcctgttgtccgacaccccaggcagcctcgcgttactcgctgaagcccttgggattgtagaggccaatattcaatccgtggacgtggtggaacgcttccccaatggcacggtcatggacgatctggtgatctccatccctcgcgatgtcatggcagacaccatcatcaccgcagctgaagaagtcgacggcgtggagattgattccatccgcccattctccgggactgttgaccgccgcggacagatccaaatgctggctgctgttgctcaccaacgccgcgatatcaccgcagcgatggaagaaatggtcgatgtcatcccccgcaccatgacctctggttgggctttggtcattgatctaaaaggacccatcactcgcatcgctggttccctagcagcgcccgaagatgacggcaccgttccggagaacatcgttctcaaagaagctcgcatgctcaacccggaaaacgatccgtggattccagagtcctggacactgcttgattcttcccttgccatcgctccgatcggcaagcacggcctggctctgattatcggtcgccctggtggccctgatttcttggccagcgaagtggagcacttaggccaagtcggtgacattatcggagcaatgcttcaaaaataatctgagctgtttaaaaaatgccccaag

SEQ ID NO: 34 - protein, 221 aa, Corynebacterium glutamicum
MSFLIRVLLSDTPGSLALLAEALGIVEANIQSVDVVERFPNGTVMDDLVISIPRDVMADTIITAAEEVDGVEIDSIRPFSGTVDRRGQIQMLAAVAHQRRDITAAMEEMVDVIPRTMTSGWALVIDLKGPITRIAGSLAAPEDDGTVPENIVLKEARMLNPENDPWIPESWTLLDSSLAIAPIGKHGLALIIGRPGGPDFLASEVEHLGQVGDIIGAMLQK

SEQ ID NO: 35 - DNA, 634 bp, Corynebacterium glutamicum
  CDS (101)..(604): RXA00220
agatcgtgccgagtttccggtttggatggggtttgggatgttaatgggagaggatcggcgtgatcgtgccggtttttcttgcgttggtagtcttggggctatgagcgcattccacatccgagcggaacaatcgcgcgatatcagcgcgattcatgatgttactgaagcggcctttacaggaattgagcattcagatggaacagagcaagatctcgtcgataagcttcgtgctgcaaaggcgctgagcctttcgctcgtcgctgaggcggatggcgaggtcattgggcatatcgcagcctctgaggtactgatcggcggtggggtgcagggctggtttggcattgggcctgtcagtgttcggcccgataagcagcagcaaggcgtgggtattgcgctgatgggcagcgcgcttgatcagttgcgtgcggagggtgctggcggcatcgtgttgctgggggatccgggctattatcgacgcttcggttttgaggtcgtgcccgggctggtctatccggacgcgccagcggaattttttatggctgtgtgtttgaatgctccggcgtttccgcagggtgttgtggagtatcactcggcatttggagggtagagaccccatcgtggcgggcctgggctc

SEQ ID NO: 36 - protein, 168 aa, Corynebacterium glutamicum
MSAFHIRAEQSRDISAIHDVTEAAFTGIEHSDGTEQDLVDKLRAAKALSLSLVAEADGEVIGHIAASEVLIGGGVQGWFGIGPVSVRPDKQQQGVGIALMGSALDQLRAEGAGGIVLLGDPGYYRRFGFEVVPGLVYPDAPAEFFMAVCLNAPAFPQGVVEYHSAFGG

SEQ ID NO: 37 - DNA, 373 bp, Corynebacterium glutamicum
  CDS (101)..(343): RXA00240
ttgagaccccgcagaatctgattgagtattcactcatttaacgtagttgacgtacggcgaagtcgctaaacttcgcgtaatcttggggccaattaatcaagtgcagatgaattgtttagaaaggctggagaccatgggtatttttgacgaagctaagaagaaggcaaccgaattcctcgactctgattcaggcgagcagaagtccgatggactgctggataaggccgcagacaaagctaagggtctcctcggtgaagacaaagcggatcagattaacaaggtccgtgacgctgtcgatgagcgcattggcaaaaacaacggcggcgaagagaatccagccaactagtattaggcgtcatgcgcgtcgtagttg

SEQ ID NO: 38 - protein, 81 aa, Corynebacterium glutamicum
VQMNCLERLETMGIFDEAKKKATEFLDSDSGEQKSDGLLDKAADKAKGLLGEDKADQINKVRDAVDERIGKNNGGEENPAN

SEQ ID NO: 39 - DNA, 943 bp, Corynebacterium glutamicum
  CDS (101)..(913): RXA00354
ggcttgtcggtaaggctgcagggtagcgggagtttccttcagattggaagttctttaattttctcgattatgtacctcatttacgcgtaaagtttggggcatgggaaagttacttttcgtagacatcggtggcacactgctggattactcaaatgaagttccgcgttcggccgttgacgcgatccgtaaggcacgcgccaaaggacaccgcgtgtacttgagctctggtcgaagcagcgctgaggtgacttctcagttgtgggatatcggagtggatggcctcattggcgcaaatggtggatatgtggaaagcgcacaggagtctgtgttccaccgccgtttgtcgggtgaggagacccgccacattgtggagtggctctacaaccgtggtttggagttttatctcgagtccaacaacggtttgtatgcaagccgtggtttccgtgaggcttctaagccagtgctgtctcgcctttcggagaagaccgacgtgacagtcgatagcatgtacccggatatgttctggggcgcgagccttgatcgtgacgatgtgaacaagatcagttacatcttcaattctcaggaagatttggacgcagcgcgtgaggcgttccctaacctggagcacaccacgtggggtggtcagacgggtgcgttgttcggcacgatcggtgtgtctgtcaacaagaagatcggcgtggatcgcctgctgaagtacctgaacgcagatcgcgcaaacaccattgcgttcggcgacagcgatgaggatctctccctatttgaggcgagcgcttacggcgtcgcgatgggcgaggccaccgaatcgctcaaggctgctgctgacctggtcacggatgctgttgggcaggacggcttgcgcaatgcgtttttaaagcttgagcttatcgacgcctgaccccatcaaagaacttcccaatctcct

SEQ ID NO: 40 - protein, 271 aa, Corynebacterium glutamicum
MGKLLFVDIGGTLLDYSNEVPRSAVDAIRKARAKGHRVYLSSGRSSAEVTSQLWDIGVDGLIGANGGYVESAQESVFHRRLSGEETRHIVEWLYNRGLEFYLESNNGLYASRGFREASKPVLSRLSEKTDVTVDSMYPDMFWGASLDRDDVNKISYIFNSQEDLDAAREAFPNLEHTTWGGQTGALFGTIGVSVNKKIGVDRLLKYLNADRANTIAFGDSDEDLSLFEASAYGVAMGEATESLKAAADLVTDAVGQDGLRNAFLKLELIDA

SEQ ID NO: 41 - DNA, 931 bp, Corynebacterium glutamicum
  CDS (101)..(901): RXA00397
tttttcgaggttggggtggcttttcgggtggcgtgtatgtattaaaccaaggagcttgtttgagggggagcgcttggtttgattcgacagttttcgggcattgagcctgacggaaggggagatcattcccatccaaacaaagctcggccactggcgtgacgtgcgggattccgaagatctgccattccaagtaatcgcatcgcgcaccagcgtgaccattatggaaaacaccctggaatggaccaacagccgccttgagcgtggcgaagagttcaccgagctcgacatttatgctcactacttggaagagttggaagattacgccctccaattcaccttcgatgtcgagccctacttcaccaacctgcactcctccaacagaatgctcttccctggacctcctgtggatttcccgatcaacgcagaaacccgatgcattcagctcgacgccggtgttgcagtaaagaaggacggcgtggtgctgggtacctcagatatggcgaggtccctgcctcgaaccgccgctggccaagaagcctatgagtacttcttcaaggtggttcgtgaaggcatcatcgggcagctgcgcccgggcgtgatctgcgctgacgtgcacgaagcaacccttgattacctaagcccgcagctacctcgcatgattgacatcggaatgctgggtgccgacaccgatttcaacaccatctaccgcaagcgcaatgttggccacctcatgggcaagcaggaatcctttgccaatgagcttcgccctggatacaagcacattcttcaccacggctcctatggtgccgcggagatcccttggcgctacaacggtgtagccattggtaccgaggatctgtggtacatcggcgcagacaagacctacattttgagccagcgctaaggagaacccagtgacagaaattgcaga

SEQ ID NO: 42 - protein, 267 aa, Corynebacterium glutamicum
LSLTEGEIIPIQTKLGHWRDVRDSEDLPFQVIASRTSVTIMENTLEWTNSRLERGEEFTELDIYAHYLEELEDYALQFTFDVEPYFTNLHSSNRMLFPGPPVDFPINAETRCIQLDAGVAVKKDGVVLGTSDMARSLPRTAAGQEAYEYFFKVVREGIIGQLRPGVICADVHEATLDYLSPQLPRMIDIGMLGADTDFNTIYRKRNVGHLMGKQESFANELRPGYKHILHHGSYGAAEIPWRYNGVAIGTEDLWYIGADKTYILSQR

SEQ ID NO: 43 - DNA, 1543 bp, Corynebacterium glutamicum
  CDS (101)..(1513): RXA00409
cggcgtcctctgactccaccattcaaggcctgcctgtcgcggaagccgatgccttacgtgagcgactggctattaaggcccgggagaggatgagcggactatgagcagccttgaagggtttcgaaaagtccaccgcgccaccccattccttcgcatctggaccatcatcgtcgcagttctcgcggcattcgcattcaattccggcgcatccgttttaagtttcatctggggtgtcgtcaccggcgaatacggattcgcagtgctgccgattctattgaccgtcggtggcgccgtcattgtggtggcactggcctggattatcaccggaatttggtggaaagccgtcggattccgcatcaccaatgaagaggtgcagctgcaacgcggagtgatcagcaaagacctccgcaccgcccgatttgaccgtatccaagccgttgacctggtggaatcattcatcgcccgtatcttccgactggcagaagtccgcatcgaaaccgccggcggcagcgactccgccatcagcattggctttttaagaaaaagcgaggccgaggccctaaaaagggagcttctcgacgcctcccagcactcagtcgccaccaccccagccggagttccggctgagcctggggtaggggagaccgttgtagttgagagcgcgggcgatgttctggttccacaaatccccgtgcaacgcaccctcgccagcaccgccttatcactagcaaccatcatcaccgcgatcggtattgtgattttgctcttcgttcctttcggagtgagcattgccgtgccgttctttgtaggcatggtgccagcggtctggaacttgatcgataagtcgtggcaattcaccgcaacacagcgcaacgatgtcctgcatgtcagctatggacttgccaaccgccgcaaacaatcaatcccactgggacgcatccacgcagtgaaactaaaacagccattgctgtggcgactggttggctggtggaccgtgaccgtgactgtagttggctacggcgacaccacccaaggcggaacctccaaaatcttgcccgtgggttccaaagaactcgcactaaaagtccttgaagcggtggggccactaaacagcgccgacatcgccgaatctgcagacccatcacatatgagcagaccccagtacacaccaccagttgctgcacgcctgctcacaccagtcgatcggacccgccaaggcgtcacgttgattggtgtggctggtgcccctggtgcggtggtcgtgcatgaaggcagattcatgccacgtatgtctgtgattgatacctcccacatccaagaactcacccttaaacacgggccgatccaaagaatactgggactctccaccgttgtgtttaacctggtccaagggccagtgggaatggccgcatcggatctcagtgcagctgatggaaaagaacttctcaacattctccgcaacagaaaactacccgcactggaatcagctccgctgggacaaaacagcctggactaaggtgtaatcatgcacatctcagatctt

SEQ ID NO: 44 - protein, 471 aa, Corynebacterium glutamicum
MSSLEGFRKVHRATPFLRIWTIIVAVLAAFAFNSGASVLSFIWGVVTGEYGFAVLPILLTVGGAVIVVALAWIITGIWWKAVGFRITNEEVQLQRGVISKDLRTARFDRIQAVDLVESFIARIFRLAEVRIETAGGSDSAISIGFLRKSEAEALKRELLDASQHSVATTPAGVPAEPGVGETVVVESAGDVLVPQIPVQRTLASTALSLATIITAIGIVILLFVPFGVSIAVPFFVGMVPAVWNLIDKSWQFTATQRNDVLHVSYGLANRRKQSIPLGRIHAVKLKQPLLWRLVGWWTVTVTVVGYGDTTQGGTSKILPVGSKELALKVLEAVGPLNSADIAESADPSHMSRPQYTPPVAARLLTPVDRTRQGVTLIGVAGAPGAVVVHEGRFMPRMSVIDTSHIQELTLKHGPIQRILGLSTVVFNLVQGPVGMAASDLSAADGKELLNILRNRKLPALESAPLGQNSLD

SEQ ID NO: 45 - DNA, 2161 bp, Corynebacterium glutamicum
  CDS (101)..(2131): RXA00416
caagctctgaaagcagatagcacgtgagactcattaatacatacttgtaattttgctcctcgatcccagcaatgctcgttgagtatgaaagacttctatcatgattaacacctctgaagatgaaggtgcagtcgtggttcatgaggatttgaatccttatggtccatcacgtgtgcctgaaggcgaagtgtatcggcctgatcgtctaaacaggaaagctacacttgttgcaattgtgggagctgccatcctggctttcgcatttgctttggtgttgtggatgggtttaaaacaaacaaaccttccagctttcggcccatcgaatgtcacgagggctgttgcttctgccaccatcgctgcggttttgattgtcacgggttttttgacgtggctgtggctgcgcgatgaacatcagagcaatccgcggtgggagttggaggacgtcaagccaaggcccaagtggcggacggcgctgacgtatctggcgtcttacttaagcccagctgcgctggtggttgcggtgttggctattccgctgtctgcgacccgcctgtatttggacggaatcagcgttgaccagggctttagaactcagtttttaacccgcatggctgacgatatcggcttgtcggacatgaactacatcgatatgcctaccttctaccctgctggatggttctggctcggtggtcgcttggccaatcttttggggctgcccggttgggaagctttccagccatgggcaattgtgtccatggcagttgctgcttctgtgttagttccagtgtggcagcgcatcaccggttccctgccggtggcaacaggcattgcgttggtgacaacctgcattatcttggcgatgaattccgaagagccctacgctgcaatcgttgcgatgggtattccagcgatgctcgtgctggcttcccgcattgccaagggcgataagtttgcgcttgccggcggcattatttacttgggtgtttcggctactttctatactttgttcaccggtgctatcgcgctttctgcggtcgcggtgtgcatcgtggtggcggctattgtgcagcgctccatcaaaccactgctgtggcttgcagtgctgggtggtggatccattgtcattgcgttgatttcttggggtccttaccttctggcctccatcaacggagcggagcgctctggcgattccgcaacacactacctgcctcttgaaggcacccaattcccggttcctttcttggcatcaagcgttgtgggactgttgtgtcttgttggcctgatctatttggtggtgcgtttccacaacaatgaggtgcgcgcgatgtgggtcggcatcgcagtgttttatgcctggatgggcatgtccatggcgatcacgcttttgggcaacacgttgcttggattccgtcttgatacggtgctggtgcttatttttgccacggctggagtgttgggcattgcagatttccgccttgccagtgtgtatcagctctaccccacccaaatcacagagcgcacggccacccatctgaccaatctaattgtggtcctcgtgctgcttggcggcctctactacgcgcaagatctgccgcagaagaacgcacgagctatcgatctggcctataccgatactgatggctacggcgagcgcgcggatctgtatccggccggagctgcacgttattacaaggacatcaacgatcatctgcttgatcaaggattcgagccttccgaaactgtcgtgctgacagacgaactcgatttcatgtcctactacccttatcgcggataccaagcttttacttcccactacgccaacccgcttggtgagttcggaaacaggaacgcattcatcgaagatctcgcgatccgaagctgggatgagttggctgatcctcaacaattcagcgacgccttgaacacctctccatggacgatccctgaggtgttcatcttccgtggctccatcgatgatcctgacgccggttggaaatacgacgtggctgaagatctgtacccgaacaatccaaacgtgcgcttccgcggcgtgtactttaacccggagtcatttgatcagatgtggcagaccaagcaagtgggacctttcgtggtggtaacgcacaatgagtaattcctcaccaaacgacccaagccctat

SEQ ID NO: 46 - protein, 677 aa, Corynebacterium glutamicum
MINTSEDEGAVVVHEDLNPYGPSRVPEGEVYRPDRLNRKATLVAIVGAAILAFAFALVLWMGLKQTNLPAFGPSNVTRAVASATIAAVLIVTGFLTWLWLRDEHQSNPRWELEDVKPRPKWRTALTYLASYLSPAALVVAVLAIPLSATRLYLDGISVDQGFRTQFLTRMADDIGLSDMNYIDMPTFYPAGWFWLGGRLANLLGLPGWEAFQPWAIVSMAVAASVLVPVWQRITGSLPVATGIALVTTCIILAMNSEEPYAAIVAMGIPAMLVLASRIAKGDKFALAGGIIYLGVSATFYTLFTGAIALSAVAVCIVVAAIVQRSIKPLLWLAVLGGGSIVIALISWGPYLLASINGAERSGDSATHYLPLEGTQFPVPFLASSVVGLLCLVGLIYLVVRFHNNEVRAMWVGIAVFYAWMGMSMAITLLGNTLLGFRLDTVLVLIFATAGVLGIADFRLASVYQLYPTQITERTATHLTNLIVVLVLLGGLYYAQDLPQKNARAIDLAYTDTDGYGERADLYPAGAARYYKDINDHLLDQGFEPSETVVLTDELDFMSYYPYRGYQAFTSHYANPLGEFGNRNAFIEDLAIRSWDELADPQQFSDALNTSPWTIPEVFIFRGSIDDPDAGWKYDVAEDLYPNNPNVRFRGVYFNPESFDQMWQTKQVGPFVVVTHNE

SEQ ID NO: 47 - DNA, 619 bp, Corynebacterium glutamicum
  CDS (101)..(589): RXA00424
aggttggtgcgttccgccgcgatgtggacctcgggagccttggcttttttgaatctttcaaacatgcccaccaccttaatcagtgagtagtcttggcaacatggataccaggatgagattgcaggtagcagcaggttccgcgctgattggtgctggggttgcggttaatgattacgtacaaagcccagtccgccgggccatcagttatggtgcgttggcgctttctggggcgacggtgattgcgatgggtcaggacccgactggggagcggtccatcattgcgaaagattccgcgacgatggttgatcaaatccgccaggagatcggcgatttgggtgtcacgcctggtccagaatctgatgtggatgccatcacggagcgaggtccgctggtgacgtggctgttgcttgctgtttttgtcgtggcatttttcaccttggcgtatttctccatgcgcatggatgtggcggtgatgagaaggatcgctaagttctttgaaaaacgtggcgcttccaggccattcacctgcactggcatggtgtacgccgcttttatttacgcaatctgtgagctggaggcccgcacaaaatgacctatcccgtgttgagtgttttggata

SEQ ID NO: 48 - protein, 163 aa, Corynebacterium glutamicum
MDTRMRLQVAAGSALIGAGVAVNDYVQSPVRRAISYGALALSGATVIAMGQDPTGERSIIAKDSATMVDQIRQEIGDLGVTPGPESDVDAITERGPLVTWLLLAVFVVAFFTLAYFSMRMDVAVMRRIAKFFEKRGASRPFTCTGMVYAAFIYAICELEARTK

SEQ ID NO: 49 - DNA, 652 bp, Corynebacterium glutamicum
  CDS (101)..(622): RXA00451
gtggttggctgcatggaggtcgcggaggagggatccgccgatgaggccgaggcccaggatgcatactgggcgggaaatgtctttggtagtcacctgacaagtgtggcacatacctactacggttatctctatgaacactgaagaggatggcctgagctttgcagttacggctaccttagttgaaggtaaatggcaggtacgcgagtttgaggatcacttctccaagctctctacctctattaatgcggttcgctcgctgcgtagcgaggggccggcgtttgcgctgttgtgcgttgatgatgaatattttgtgatggtgcgtcccaccccaagtagggtattccttttcctttcggatgcgccgatggctgtcgacgatgatttcgccgccgcggtgatggatgaactcgatgcggatcttccagatatcaaccctgatgatttggacgacatcgatccatggccagaaggtgatttcgatattttggcggatttggggctgtctgaggaggttctttccgtgatttgcgatgacatggatttggatccttccgaacaattgctgcgcatcgcggaagaactcggttttgataatgatctggctcgggtggtgggattcgactagtgggcgttttacctgtgcaggcgcgca

SEQ ID NO: 50 - protein, 174 aa, Corynebacterium glutamicum
VWHIPTTVISMNTEEDGLSFAVTATLVEGKWQVREFEDHFSKLSTSINAVRSLRSEGPAFALLCVDDEYFVMVRPTPSRVFLFLSDAPMAVDDDFAAAVMDELDADLPDINPDDLDDIDPWPEGDFDILADLGLSEEVLSVICDDMDLDPSEQLLRIAEELGFDNDLARVVGFD

SEQ ID NO: 51 - DNA, 991 bp, Corynebacterium glutamicum
  CDS (101)..(961): RXA00476
gtgaacgaattgttgtaattcgtcttaaaaacgccaggagacgtgaaaattacagacaccccagacatcagatggaggcggcgatactagggtagaggacatgactcttcgctgttctgacgtcaatgttgaacccctgccgggaacggcaaaaacaggttctgggtttgttctccttgaacatgctggctcgtggagccgtgatgttttagacggcggaacatttgatcctgagttgactgatcaattgaagaggcacctgaaagcttccggaatgggtctgcaattaattaggaagccgggaagggagggtcgaaacgtcgaaaagcataatctttttctcgtttttgctgaggcctcaattattgagcacctggtggtggacgcgccggctgatgttttggatcttgatttaagcgggccgggcaaaaacaatgcgcagcgcatggatgatccgatgctgctgatttgtacgcattcgaagcgcgatgtgtgctgcgcgatcaaggggcgtccgctggcagctgccgtggagccacaatttgggccgctgcatgtgtgggaggcttcgcacaccaagggccaccgttttgcgccatcgatgctgctcatgccgtggaattactcttatggcctacttgatgaggccgaaaccgtgcagcttttccaaggcgcgttggacaacaaactcttcctgccgggcaaccgtggccgaggaaccttagatgctcgtggccaggttgcagaaattgccgtggcggaagctttcggcgaggcggttgctcctgcgagtttgcaggttgaattcgaagatgattctgttttggttactcatcccgatgggcgcacgtgggttgtggagcttgaacgcatcgaggtcgacggcgtggtgtcctcgtgtggtgatcagccgaaaactggaaaagcgtgggtggctaggcaagttacagaactgatcggataaaagcagagttatatctgatgaattgct

SEQ ID NO: 52 - protein, 287 aa, Corynebacterium glutamicum
MTLRCSDVNVEPLPGTAKTGSGFVLLEHAGSWSRDVLDGGTFDPELTDQLKRHLKASGMGLQLIRKPGREGRNVEKHNLFLVFAEASIIEHLVVDAPADVLDLDLSGPGKNNAQRMDDPMLLICTHSKRDVCCAIKGRPLAAAVEPQFGPLHVWEASHTKGHRFAPSMLLMPWNYSYGLLDEAETVQLFQGALDNKLFLPGNRGRGTLDARGQVAEIAVAEAFGEAVAPASLQVEFEDDSVLVTHPDGRTWVVELERIEVDGVVSSCGDQPKTGKAWVARQVTELIG

SEQ ID NO: 53 - DNA, 1039 bp, Corynebacterium glutamicum
  CDS (101)..(1009): RXA00486
gtttattcatgcccttgattattgccaaagaaacctttaaggactagatcgaaaaacagccaactatagttaagtaatactgaacaattttggaggtgtcgtgctcaatctcaaccgcttacacatcctgcaggaattccaccgcctgggaacgattacagcagtggcggaatccatgaactacagccgctctgccatctcccaacaaatggcgctgctggaaaaagaaattggtgtgaaactctttgaaaaaagcggccgaaacctctacttcacagaacaaggcgaagtgttggcctcagaaacacatgcgatcatggcagcagtcgaccatgcccgcgcagccgttctagattcgctgtctgaagtgtccggaacgctgaaagtcacctccttccaatccctgctgttcacccttgccccgaaagccatcgcgcgcctgaccgagaaatacccacacctgcaagtagaaatctcccaactagaagtcaccgcagcgctcgaagaactccgcgcccgccgcgtcgacgtcgcactcggcgaggaataccccgtggaagtcccccttgttgaggccagcattcaccgcgaagtcctcttcgaagaccccatgctgctcgtcaccccagcaagcggcccatactctggcctcaccctgccagaactccgcgacatccccatcgccatcgatccacccgaccttcccgcgggcgaatgggtccataggctctgccggcgcgccgggtttgagccccgcgtgacctttgaaaccagcgatcccatgctccaagcacacctcgtgcgtagcggcttggccgtgacattttcccccacactgctcaccccgatgctggaaagcgtgcacatccagccgctgcccggcaaccccacgcgcacgctctacaccgcggtcagggaagggcgccaggggcatccagccattaaagcttttcgacgagccctcgcccatgtggccaaagaatcttatttggaggctcgtctagtagagtgagttcttgtgagccttcagacaaatcat

SEQ ID NO: 54 - protein, 303 aa, Corynebacterium glutamicum
VLNLNRLHILQEFHRLGTITAVAESMNYSRSAISQQMALLEKEIGVKLFEKSGRNLYFTEQGEVLASETHAIMAAVDHARAAVLDSLSEVSGTLKVTSFQSLLFTLAPKAIARLTEKYPHLQVEISQLEVTAALEELRARRVDVALGEEYPVEVPLVEASIHREVLFEDPMLLVTPASGPYSGLTLPELRDIPIAIDPPDLPAGEWVHRLCRRAGFEPRVTFETSDPMLQAHLVRSGLAVTFSPTLLTPMLESVHIQPLPGNPTRTLYTAVREGRQGHPAIKAFRRALAHVAKESYLEARLVE

SEQ ID NO: 55 - DNA, 1744 bp, Corynebacterium glutamicum
  CDS (101)..(1714): RXA00493
cccgttacggcggcaccgagatcaagttcggtggcgtggagtacttgcttctctccgctcgtgacatcctcgcaatcgtcgagaagtaggggataagttcatggcaaagctcattgcttttgaccaggacgcccgcgaaggcattctccggggcgttgacgctctggcaaacgctgtcaaggtaaccctcggcccacgcggccgtaacgtggttcttgataaggcattcggcggacctctggtcaccaacgacggtgtcaccattgcccgcgacatcgaccttgaggatccttttgagaacctcggtgcgcagctggtgaagtccgttgctgttaagaccaacgacatcgctggtgacggcaccacgactgcaactctgcttgctcaggcactcattgctgaaggcctgcgcaacgttgctgctggcgcaaacccaatggagctcaacaagggtatttctgcagctgcagaaaagaccttggaagagttgaaggcacgcgcaaccgaggtgtctgacaccaaggaaatcgcaaacgtcgctaccgtttcatcccgcgatgaagttgtcggcgagatcgttgctgcagcgatggaaaaggttggcaaggacggtgtcgtcaccgttgaggagtcccagtccatcgagactgctctcgaggtcaccgaaggtatttctttcgacaagggctacctttccccttatttcatcaacgacaacgacactcagcaggctgtcctggacaaccctgcagtgctgcttgttcgcaacaagatttcttccctcccagacttcctcccattgctggagaaggttgtggagtccaaccgtcctttgctgatcatcgcagaagacgtcgagggcgagcctttgcagaccctggttgtgaactccatccgcaagaccatcaaggtcgttgcagtgaagtccccttacttcggtgaccgacgcaaggcgttcatggatgacctggctattgtcaccaaggcaactgtcgtggatccagaagtgggcatcaacctcaacgaagctggcgaagaagttttcggtaccgcacgccgcatcaccgtttccaaggacgaaaccatcatcgttgatggtgcaggttccgcagaagacgttgaagcacgtcgcggccagatccgtcgcgaaatcgccaacaccgattccacctgggatcgcgaaaaggcagaagagcgtttggctaagctctccggtggtattgctgtcatccgcgttggtgcagcaactgaaaccgaagtcaacgaccgcaagctgcgtgtcgaagatgccatcaacgctgctcgcgcagcagcacaagaaggcgttatcgctggtggcggttccgctttggttcagatcgctgagactctgaaggcttacgccgaagagttcgaaggcgaccagaaggtcggcgttcgcgcactggctactgctttgggcaagccagcgtactggatcgcctccaacgcaggtcttgacggctctgttgttgttgcacgcactgctgctctgccaaacggcgagggcttcaacgctgcaactttggaatacggaaacctgatcaacgacggtgtcatcgacccagtcaaggtcacccattccgcagtagtgaatgcaacctctgttgcacgcatggttctgaccactgaggcttctgttgttgagaagcctgcagaagaagcagccgatgcacatgcaggacatcatcaccactaaagttctgtgaaaaacaccgtggggcag

SEQ ID NO: 56 - protein, 538 aa, Corynebacterium glutamicum
MAKLIAFDQDAREGILRGVDALANAVKVTLGPRGRNVVLDKAFGGPLVTNDGVTIARDIDLEDPFENLGAQLVKSVAVKTNDIAGDGTTTATLLAQALIAEGLRNVAAGANPMELNKGISAAAEKTLEELKARATEVSDTKEIANVATVSSRDEVVGEIVAAAMEKVGKDGVVTVEESQSIETALEVTEGISFDKGYLSPYFINDNDTQQAVLDNPAVLLVRNKISSLPDFLPLLEKVVESNRPLLIIAEDVEGEPLQTLVVNSIRKTIKVVAVKSPYFGDRRKAFMDDLAIVTKATVVDPEVGINLNEAGEEVFGTARRITVSKDETIIVDGAGSAEDVEARRGQIRREIANTDSTWDREKAEERLAKLSGGIAVIRVGAATETEVNDRKLRVEDAINAARAAAQEGVIAGGGSALVQIAETLKAYAEEFEGDQKVGVRALATALGKPAYWIASNAGLDGSVVVARTAALPNGEGFNAATLEYGNLINDGVIDPVKVTHSAVVNATSVARMVLTTEASVVEKPAEEAADAHAGHHHH

SEQ ID NO: 57 - DNA, 1156 bp, Corynebacterium glutamicum
  CDS (101)..(1126): RXA00496
ctgcagagatggtgggcagcaccccaggtgctgtacgagttgcccaacacagggcactcacgacacttcgaagcacacttgagcagcaggagaacaagtaatgactcgacgtctacatggtggtgagcaggatggccaggaacacgttaaaggacagctaaagcagctgttcgacgacgacgcgttcttgactgacctgtcccgcggcgttgatccctcagagggcgatgacgccctcgctggcctcctcctcgatttaacaaaggaagctcaggagccgccggcaacaatgccggattggtctactttgctccctggaattttggatcaggatcaggatttgccagtggaatccacttcggacaccacggttatgcaggcatcaaaccctgcaacccaagaattcgcacctgtttctatttctgatacccccaacactgcaactaattcagctgatgcagatgagtccgcaactgttgttccacttgcagcacgccgtgagaagcgtgccaagagcggatcaagcggggttcattcactggatgcttcggcaacccagcgcaaatctcacccattccttagcggtttggtgggtgctgcagctgcaactctagtcatcgcaggcggtggagcagcagtgtacaacgctgatgaaaactccccgttgtatggcatgaatcagcagctgtttggcaatcaagattctccaagcgtggtggagcttgcctccacgctggaagaagttgatagtcgtacagctagtggcgatgtggaaggggcacgtgctctactcgagcaggctcgagcaatgctggatggcatggcacctcctcgaaaggcgccgtcggaggcaacccgaacggttgaatctgaaccaggtactcagacgttgactgcaacggttactgaatccgcaagtccggaaccaccggtcacggaaactcaaactgttacctccaccgaggtacagacagtgacaaccactgcggttgctccaccggtctggactcctaatccagagccaacaaccacagctgccccgacttctacgccttcaactggtggcggtgagggaaccggcaatgatggtgactctggacttgtgccacctcagactcctggaaactaggtaaaaatataaaaactgctagcaacg

SEQ ID NO: 58 - protein, 342 aa, Corynebacterium glutamicum
MTRRLHGGEQDGQEHVKGQLKQLFDDDAFLTDLSRGVDPSEGDDALAGLLLDLTKEAQEPPATMPDWSTLLPGILDQDQDLPVESTSDTTVMQASNPATQEFAPVSISDTPNTATNSADADESATVVPLAARREKRAKSGSSGVHSLDASATQRKSHPFLSGLVGAAAATLVIAGGGAAVYNADENSPLYGMNQQLFGNQDSPSVVELASTLEEVDSRTASGDVEGARALLEQARAMLDGMAPPRKAPSEATRTVESEPGTQTLTATVTESASPEPPVTETQTVTSTEVQTVTTTAVAPPVWTPNPEPTTTAAPTSTPSTGGGEGTGNDGDSGLVPPQTPGN

SEQ ID NO: 59 - DNA, 1852 bp, Corynebacterium glutamicum
  CDS (101)..(1822): RXA00503
aatccacgaaggtgcccaagaatcaccaatttcggtcggaactgatccttctttgtccgttgagaccccacaggtgttttaaacatttagtattagttccatgaaaccagtcttctccgttgaccaaatccgacgcgcagaaaacaccctttttgagcttcaggcagatccggatgagctgatgatctccgcggcatcggcggtggccgatgtcgcgttggcaatggtggacggccccgctccagcggtctccagtgaggagtcaatcctgctgctggtcggccccggtggcaacggtggcgacgccttgtatgcaggcgcgttccttgcagaagaaggccaccacgttgatgctttgctgttgggaaacggcaaagtccatcaatcagcattggcatattatgagtctttgggcgggcagatcatttccgattttccccctcactacctctaccgcctggtgattgatggtttgtttggcatcggtggtcggggagggctcaccccagagctggccagtttggtggagtctttttccgcttcaggtatccccattttggcgattgatgtgccgtctggcgtgcatgccgatagtggtgaactgccgcccggcgtgatggtgacggtggaaggatttgataatgatgcaccgatggcgcgtcagaaaattccggcacacattgacgctgatgtcacgatcacgtttggcggtttgagacgcgcccacgcggtcagtcctgcgtgtggtgaagtgctctgtgctgatatcaacatcgctggtggcggcggaaaatcgctgtccgctgagttgagtcaggtgcaggcagaagacgcgaccccgcagatgtttgcctccaaggcgtatcaacggaaagattcgctttttgagcgcgcgaatctcaaagctacggcgccacatatccataggatcggccagcactttaccgtgttgaacatggagcctggcccggatcatgataaatacagtggcggaattgtcggcattgttgcaggtagtggcacctatccaggtgctgctgtgctgtcggtgaaggcggctgtcagggccacaagcgccatggttcgatacgttggccctgcgttaaattttgtcatccagtcgctgccggaggtcgtcgcaacgcaatcacttgccaccgccggccgcgtgcaagcgtgggtgcacggccccggacgcgggctggaggctgagcaatcagccgagcttgcggagcttttgagccggcctgagcctgtgcttatcgacgccgacagcctctcattactccagctctcagcggagcttcggcaggcgttgcgcgagcgaaaagcaccaacggtgctcactccgcacaagggcgaatttgaacgcatcgcagcagaattacgctctgaaggcgtcgagattccccaagcggacaaagatcccattggtgctgcgcaagcgttagctaaagaatttgattgttgcgtactgctcaaggggaaatacaccgtcattgcagctcacgactttgtgcatgcgatcaacgctgggcattcctggttggctacacctggctctggcgatgtgttgtcaggtcttgtcggtgcacacttggctcaaagctacgcagaattaaaccgcttgccggagtttttccccgatgtgaccttgtctgattcggcgatttacacccagattgcacctgctgcgaccatccacgcggttgctgctgggttggccgcacgaaccgaatttgggtttgcgccgacctccgcaagtttgatcgctgatgccatccctgcagcgaccgccaaggtggatttgaagcgaattgtctagctctgcatgaattccgtatgaattctt

SEQ ID NO: 60 - protein, 574 aa, Corynebacterium glutamicum
MKPVFSVDQIRRAENTLFELQADPDELMISAASAVADVALAMVDGPAPAVSSEESILLLVGPGGNGGDALYAGAFLAEEGHHVDALLLGNGKVHQSALAYYESLGGQIISDFPPHYLYRLVIDGLFGIGGRGGLTPELASLVESFSASGIPILAIDVPSGVHADSGELPPGVMVTVEGFDNDAPMARQKIPAHIDADVTITFGGLRRAHAVSPACGEVLCADINIAGGGGKSLSAELSQVQAEDATPQMFASKAYQRKDSLFERANLKATAPHIHRIGQHFTVLNMEPGPDHDKYSGGIVGIVAGSGTYPGAAVLSVKAAVRATSAMVRYVGPALNFVIQSLPEVVATQSLATAGRVQAWVHGPGRGLEAEQSAELAELLSRPEPVLIDADSLSLLQLSAELRQALRERKAPTVLTPHKGEFERIAAELRSEGVEIPQADKDPIGAAQALAKEFDCCVLLKGKYTVIAAHDFVHAINAGHSWLATPGSGDVLSGLVGAHLAQSYAELNRLPEFFPDVTLSDSAIYTQIAPAATIHAVAAGLAARTEFGFAPTSASLIADAIPAATAKVDLKRIV

SEQ ID NO: 61 - DNA, 985 bp, Corynebacterium glutamicum
  CDS (101)..(955): RXA00507
gttcatgttgaactattgtgccaccaaccgcggacagaaatacgattggtgccggggttagtgccagtattgccccacgctttcaactatccttaaacacgtggctgagaatctgaacaaacacctgtccaaactgtccaagcgcggaccgcaccgcgtgctggtaggcgatatgaactacgccggcatcccgggcaaaatctacaccccagcagaaggcgacggcatcccaggtgtagctttcggccacgactggatgaaatccatcaagtactaccaccaaactttgcgacacctcgcgtcctggggcatcgctgttgccgccccagacaccgaaaatggcttcatgccagaccacaaaggtttcgcctctgacctcgaatcctccattcagattctcggcggcgtaaaactcggctccggaaacgtcaccgtcaacccagcctgcctcggtgtagtaggccacggcatgggtgctggggctgcagtactatccgcagcaaaccgcgacctcgtgcgcgcagtcggagcaatctacccagcgaaaacctccccctcagcaatcgacgccgccttcgctgtcaaagccccaggcctagtcatcggatcctccagcctcggcctctttgaatccggcgagccagcaaaactcgcagccaactgggccggcgatgtctgctaccgcgaatcagaaaaaggcaaccaacagggcttctctgaagacaccatgttcaaacttgtcgcaggaatcggcagcccacaaaccggagctcaagaaaccgtccgcggcctcctcaccggattccttctccaccaacttgccggagaaaagaaatacaaagcattctccgaaccagacgctgaagctaagaaagttgtctcctacttcggccaggagctgcaggaacatgccttccctaaggacacgtccccattcgcgttccttaacgagaagtagttcgcttttcttagtgggtgattttgt

SEQ ID NO: 62 - protein, 285 aa, Corynebacterium glutamicum
VAENLNKHLSKLSKRGPHRVLVGDMNYAGIPGKIYTPAEGDGIPGVAFGHDWMKSIKYYHQTLRHLASWGIAVAAPDTENGFMPDHKGFASDLESSIQILGGVKLGSGNVTVNPACLGVVGHGMGAGAAVLSAANRDLVRAVGAIYPAKTSPSAIDAAFAVKAPGLVIGSSSLGLFESGEPAKLAANWAGDVCYRESEKGNQQGFSEDTMFKLVAGIGSPQTGAQETVRGLLTGFLLHQLAGEKKYKAFSEPDAEAKKVVSYFGQELQEHAFPKDTSPFAFLNEK

SEQ ID NO: 63 - DNA, 1639 bp, Corynebacterium glutamicum
  CDS (101)..(1609): RXA00510
acgcttttacccaaacaacccaagccgccgaggaagaagttaaacgattcgacaataccgacaaagtttttggtgccggatttgatgggattgatccgaagtgaatgatcctttagccggctacggagcagtgatctccgcactacaaggcgccagtggtgggatgtatcgcggaccggcgaaatccgaaggccagttgcgcgagatgtaccaaaccatcgaagggctagacaccagctcgttgcgcgaagctgccgaagcagcagtgggcggaacgaacgaagccagaatacaagggtgggtcggcccgctcttgaaattcttcgggacggttggcgggggaatgatcgccacggagatagctgaacgggcagtcgattggttcaaaaaccgtaatgatgtggaagaagtcagcgaagccgctgataaagccgccgatgcgatcgactccactgtcacagagtccgaccagggcatgatgcacattatccagcagctcttggacattgtgtctacgttgacgcagattcttggcagcatggatcgggggaaatttcctcaagaattccgggactgtgtccaaactggagctgatcttattgaccaggcaggggacatgcttgaaggattgtgcgctgatcgagatgatgcgatttcacagtgtttctccgcgttgaccgatcatggaaaacaagtttgtgaaactgagccaaagccgttgtgtagtgcagcttctgggggttcatctggtggagcgacttcttcggctgcggcctcttcaggtggttcaagctcgagcactgctagctctgggagttctggcggatcgagcagtgctgcggatagttcgacgtcgaccaatgctgaatccagtgttgaaaaggaaaagaccacacctgctgccgttgagaaacctgacgagaaaccagtggagaagccggttgaaaagacgccagaaaagccggtagaaaaacctgtcgagaagcaagagtgtgaagaaaagcctgaccctgacccggaaaaatgcaaaacagagccggtcgagtgtgagccaacaccgaaacctgaaacagagcctgaaccaaaaccgacacccacgcccacacccggaacaccaacaccaatacctgagctagagactgaggattgtgaacctggcaaggagacgggcacagactcagaatctgaatcggaagagtgcgcccccgagctcaatgacgttccagaagagtcggatctgattgggcaactcatcaagggagcaatcggtattgggattgttgttgtaggcgttgggctgttggtgaatttcctggagcagtgcgtccctgtgattgaagaagtacctgtgccggagcccgagcctatacctgaacccgctccgcagcctgagccaacttcagtgaaaccaccagagtctgaactagataaggtggctgagcctgcgccgaagccaattccacaagctaattacactgctgctgcagcaactaactattccgctcccgcgcacgctcccgttgtcccaattacgccggcagcacctgaagttccggcagcaccagaagtgcctgcaccggcggttaatcttcacaaggccggcgggtggtagcggtggagtatgcggaatttctccagc

SEQ ID NO: 64 - protein, 503 aa, Corynebacterium glutamicum
VNDPLAGYGAVISALQGASGGMYRGPAKSEGQLREMYQTIEGLDTSSLREAAEAAVGGTNEARIQGWVGPLLKFFGTVGGGMIATEIAERAVDWFKNRNDVEEVSEAADKAADAIDSTVTESDQGMMHIIQQLLDIVSTLTQILGSMDRGKFPQEFRDCVQTGADLIDQAGDMLEGLCADRDDAISQCFSALTDHGKQVCETEPKPLCSAASGGSSGGATSSAAASSGGSSSSTASSGSSGGSSSAADSSTSTNAESSVEKEKTTPAAVEKPDEKPVEKPVEKTPEKPVEKPVEKQECEEKPDPDPEKCKTEPVECEPTPKPETEPEPKPTPTPTPGTPTPIPELETEDCEPGKETGTDSESESEECAPELNDVPEESDLIGQLIKGAIGIGIVVVGVGLLVNFLEQCVPVIEEVPVPEPEPIPEPAPQPEPTSVKPPESELDKVAEPAPKPIPQANYTAAAATNYSAPAHAPVVPITPAAPEVPAAPEVPAPAVNLHKAGGW

SEQ ID NO: 65 - DNA, 2290 bp, Corynebacterium glutamicum
  CDS (101)..(2260): RXA00550
gccagctgattctcagattcagatgaataggcttaggcgcagtattctctacagcacaagcttcagataagaaccagatctgattgaacggaaacaccagttgacgaatagtaaaaatcctcctgccaaaaagagcagcggcaaaaggcgcttaaagagcgactctaagggctacgctgtaagaaacaccatcattggtgccattgttgctgtcattttgattccagtaatggtcttcatgggtgcttacatcatggttgatgttccagaaccggaagagttggtttcaccccaggtttcgcagatttacgcatctgacggtgagactgaattggcacgcatcgttcctccagaaggcaaccgccagatggtgacgatcgatcaggtgcctgacactgtgaaaaatgcggtggtggctgcggaagaccgagagttttacacaaaccccggtttttccattactggctatgcccgagcagcacttggcgtaatcactggtgattcttcagcgggtggtggttccaccattactcagcagtatgtgaagaaggctgtggttggtgatgagcgttcgctgatccgtaaggctaaggaattggtctattccgcgaagatggccaatgagtggtctaaggacgaggtccttgaggcttatctcaacactgtgtacttcggtcgaaatgcctatggtgtgcaggctgcagctcatgcattctttgataagccagtagaagagctcacggctgctgagggcgcagtgctggcggccagtattcagctgccaagccagttggatccttggacaaatccagttgaggcggaaacgcgttggaactatgtcatggacggcctggtggaaattggcgctatctcggcagaggagcgcgcagttgctacctaccctgaaaccactgaccctgcgtccaacagtgcgtacaccgaagccaccggcactaatggtttgattaagaaccaagtgatggcggagttgtctgagcttggtatcactgaggatgatgtgcaaacccgtggtttgcaggtcaccaccaccattgatccaaagactcaggaaggtgccgttgaagcggtacaaaaccagttggatcttctgtctgagaacaaccgtgcagcggtagtctccattgatccttctaatggtgcggttcgtgcttattacggcggcgaggatgcgactggttgggactttgcaaacgctccgcttcagaccggttctacattcaagatctttggtctggcagcagcacttcagcaaggtattccactgtctcagccatacagctctgcgccggtgactgtgggtgatgctcaaatcggaaacgtcggtggcagcggttgtggttcctgttccatcgagcaggcgttgttgcattcttacaacaccagcttcattcgtttgcagcaggatctggaaaatggttcacaggatactgcggacatggcgcatgctttgggtatcgcgaagtctttgccaactatccctgagacactgactgaaaacggagagaccccttatgagggcatcatcttgggtcagtatgagtcccgcccacttgatatggcttctgcgatggcaactatcgctaatgaaggtgtctggcaccgcccgcacttcgtgtccaaggtggagactgtcagcggtgaggttctctacgagttcgaggatggcgacggcgagcgtcgtgtttctgaaaaggttgcactgaatctgctcaaggccatggggccaatcgctgcatactccaacggaaacgctctggctgatggccaggtttctgcatccaagactggtaccactcagcttggtgataccggtgcaaacaaggatgcgtggatgttgggtgcggcacctcagctagctactgcggtgtgggtcggaactgctgataacactgcattgtataacacctggggtggcagtatgtatggttctaactcccctgccacgatctggaagcagaccatggataacgccctcgagaactcccctctcgaaacttgggatatcgctccagcattggggtacggtaacccaccagttccggaatatgtgtggactccaagtccaaacatcgcgactaatgatccagaaggagcaaccgaggaagctccagtggaggatccaaatgcagtaatcgatacccctgctgtagatcccactgcacctgcagaggagaccggtaacggtcaggtagaaatcctgccggggctgactatcccgggagatctcttagggatcggctaaaatccggtcgtagcctaaacgacctta

SEQ ID NO: 66 - protein, 720 aa, Corynebacterium glutamicum
LTNSKNPPAKKSSGKRRLKSDSKGYAVRNTIIGAIVAVILIPVMVFMGAYIMVDVPEPEELVSPQVSQIYASDGETELARIVPPEGNRQMVTIDQVPDTVKNAVVAAEDREFYTNPGFSITGYARAALGVITGDSSAGGGSTITQQYVKKAVVGDERSLIRKAKELVYSAKMANEWSKDEVLEAYLNTVYFGRNAYGVQAAAHAFFDKPVEELTAAEGAVLAASIQLPSQLDPWTNPVEAETRWNYVMDGLVEIGAISAEERAVATYPETTDPASNSAYTEATGTNGLIKNQVMAELSELGITEDDVQTRGLQVTTTIDPKTQEGAVEAVQNQLDLLSENNRAAVVSIDPSNGAVRAYYGGEDATGWDFANAPLQTGSTFKIFGLAAALQQGIPLSQPYSSAPVTVGDAQIGNVGGSGCGSCSIEQALLHSYNTSFIRLQQDLENGSQDTADMAHALGIAKSLPTIPETLTENGETPYEGIILGQYESRPLDMASAMATIANEGVWHRPHFVSKVETVSGEVLYEFEDGDGERRVSEKVALNLLKAMGPIAAYSNGNALADGQVSASKTGTTQLGDTGANKDAWMLGAAPQLATAVWVGTADNTALYNTWGGSMYGSNSPATIWKQTMDNALENSPLETWDIAPALGYGNPPVPEYVWTPSPNIATNDPEGATEEAPVEDPNAVIDTPAVDPTAPAEETGNGQVEILPGLTIPGDLLGIG

SEQ ID NO: 67 - DNA, 1066 bp, Corynebacterium glutamicum
  CDS (101)..(1036): RXA00552
ccgccaacaaggcagcaaagctcgatccaattgacgccttgcgttatgagtaaaagcctcgtttttaaggtagccacacatcgcactagactgaagaactgtggctacctcaaaaattcttctttattacgcattcaccccgctctctgaccctaaagcggttcagctgtggcagcgtgagctctgcgagtcactgaatcttcgtggccgcatcctgatctccactcacggcatcaatggaaccgtgggcggagatattgatgattgcaaggcgtacattaaaaagacccgcgagtacccaggtttcaaccgcatgcagtttaagtggtccgagggtggcgctgaggatttcccaaagctcagtgtcaaagtccgcgatgagatcgttgccttcggcgctccagatgagctcaaagtggatgaaaacggcgtcgtcggtggcggcgttcacctgaaaccacagcaggtcaatgagcttgtggaagcccgtggcgatgaagttgtgttctttgacggccgcaacgcaatggaagcccagatcggcaagttcaaggacgctgttgtccctgacgtagaaaccactcatgatttcatcgcagaaattgagtctggaaaatacgacgatctcaaagacaagcctgtggtcacctactgcaccggcggaattcgttgtgagatcctgagttcactcatgatcaaccgtggtttcaaagaggtctaccaaatcgatggcggcatcgttcgctacggcgagcagtttggcaacaagggcctgtgggaaggctccctctacgttttcgataagcgcatgcatatggaattcggcgaggattacaaagaggtcggacactgcatccattgcgatactcccaccaacaaatttgagcactgcctcaacgaagatgattgccgcgagctcgtgttgatgtgccctgattgcttcgccaatgttgagacccgtcattgcaagcgcgaacgctgtgcagcaattgctgcggatttcgctgagcaaggaattgatccgctcgttacttcttaaaaagggtatggtggctgggtatgagca

SEQ ID NO: 68 - protein, 312 aa, Corynebacterium glutamicum
VATSKILLYYAFTPLSDPKAVQLWQRELCESLNLRGRILISTHGINGTVGGDIDDCKAYIKKTREYPGFNRMQFKWSEGGAEDFPKLSVKVRDEIVAFGAPDELKVDENGVVGGGVHLKPQQVNELVEARGDEVVFFDGRNAMEAQIGKFKDAVVPDVETTHDFIAEIESGKYDDLKDKPVVTYCTGGIRCEILSSLMINRGFKEVYQIDGGIVRYGEQFGNKGLWEGSLYVFDKRMHMEFGEDYKEVGHCIHCDTPTNKFEHCLNEDDCRELVLMCPDCFANVETRHCKRERCAAIAADFAEQGIDPLVTS

SEQ ID NO: 69 - DNA, 952 bp, Corynebacterium glutamicum
  CDS (101)..(922): RXA00576
tgatgcccaatttttgggcgaccactggacgagggtgtgggccctcgcggcgtagggtttggagccactccggtgggttttcctgcaggttcttgaactcttggtgagtcaatgcacctgtttggaactcctctggcgtggcgggcaaaaacagtccgagcttcttagcggcggtctgtggcttcatagccctgcccgatggctggcgtacagattcttcgttcacgcccacaacggtagcattgttttcatgctgaccttaagtttcatcactggcacggagccaggaaagtggtttacccgattccgagatcggactcatcacggtggacttgagacccttgattcggacgacgccctaggcctcatgctcgctggccaggcacaactcgccttaaccaggcttccagatgcgcgtatcgacgcctccctccacgtggtcactctttatcaggaacaacccggagtcgcttttccaaaagactttttcctcagtgccgaagaaggcgcggtggaccttgcggacttagatggggagatcatcaactggtccatgcccgatagtggggaagtcgatgccgctgctgttcgcgatgctctgcaaatcgtggcagcgaacgtcggtgtggtgatcgcccccaggccacttctcaaggtgttgagcaagaaattggtggagcaccgggacatcaagggtggaactgaaacatctatcgccctggtatggaagaaagatgaggattctgaagagattcaagacttcgtcggtattgctcgcggtcgaacgcggaattccagcaggcagcaaacggtaaagctcagtgctcgtgaaaaaacactggcaaaacaagcccgcaggcagggggagaaaccaaaaactccgaagcgtccgcaggcaagaaaacgtcccggaaaacggcgataggggtcacccgcgcatgtccggttgccg

SEQ ID NO: 70 - protein, 274 aa, Corynebacterium glutamicum
LVSQCTCLELLWRGGQKQSELLSGGLWLHSPARWLAYRFFVHAHNGSIVFMLTLSFITGTEPGKWFTRFRDRTHHGGLETLDSDDALGLMLAGQAQLALTRLPDARIDASLHVVTLYQEQPGVAFPKDFFLSAEEGAVDLADLDGEIINWSMPDSGEVDAAAVRDALQIVAANVGVVIAPRPLLKVLSKKLVEHRDIKGGTETSIALVWKKDEDSEEIQDFVGIARGRTRNSSRQQTVKLSAREKTLAKQARRQGEKPKTPKRPQARKRPGKRR

SEQ ID NO: 71 - DNA, 1606 bp, Corynebacterium glutamicum
  CDS (101)..(1576): RXA00611
ctttaaattgactatttacaaaactacttgatgagttagcaagagcacatttcggtgcgcctccctgctaaacctcgaaacaataactagattgcacactatgtctgccgctgcttctcgatcaagaaacatcttgactgccctcctgctattggtcccgctcatcgcaggtaccatctacgcctccgccatgggcttggacgtctcccgcgcatggtcctcagcagatgaagtaacgggggcacctgcagcctccgtagccaccaacaaccaggagcttatcgaagcccgtcgcgccgccggagaagccggcgcccaagcggggttcctcacctcaggaactgaagagctaaccagcggaacacaagagcttatcgacggcgcagccccactcgaagaaggcgtctcagccgcggctgacggtgcagcgcaactccacgatggcctcatccaactccaggccggcactggacaaatgggaaccggcgccaccgaaattgccgacggcgtccaaaacgcagtcgaacaacttggcggtcttgtcgttgtacagcagcaactcttaggcgccctcaacgaagcagacaaacaactcgcctcgagcaaaatccccgaagccgaagacctgcgcaaacaaatcaccgaagtccgaggacacctcgaaaacttcggcatctccgtagaaatgaccgaccaactcgatcaactacgttccggcacccgcgacctggctaaccaactcgcagtccccggctacggattccacgatggtatttacagcgccaccaatggagcagccgaattatctgcaggtttgcaagagctagaagcaggcgttgggactgccgtcgaaggcttcaccgcactcgatgaaggtgcaaaccgattagactccatggccaccctcaacgaagaaaaaacctccgcagtccaacgagccctcccggtaccccaagtacccgccggcacaatcgaaggcaccgcagacgaagaacgcaccagcgcactagcgcccatgtacgccttcttaatttcagcattggtcatgctggccggtgcagcacttggatgggcaacactaaaaaacaagtggctgatggcctttgctgtcattggtgtcactgcaatcggtggcattatcttgttcaccgtagctttgggcatatccattggagctttgtttggagccttaggaattttgcttcttgccactgttgttgccggtattctctcccggattttgcttgacgtgttgggaactaccggggctattgtggtttctgttctgggatgggtagcccaagctgcagtaattggccatgtatggagtgttaccgctgtatccgatatcgcacttgtttggcgagtcgtcgcaggcatgatgccactgcattatccaacctttgcagtgacctccattggtaatggcggatcagctgcagctatctggatgtctgttgctgtcttgttggcaatgggagcgatcggagctgttgcgcttcggaagccaaaggcggttgcggttgaggttgaagaagctgttgatgctgatgcagaccaagcagcctcggaatcctgatggttttggtctgattcgacctgttct

SEQ ID NO: 72 - protein, 492 aa, Corynebacterium glutamicum
MSAAASRSRNILTALLLLVPLIAGTIYASAMGLDVSRAWSSADEVTGAPAASVATNNQELIEARRAAGEAGAQAGFLTSGTEELTSGTQELIDGAAPLEEGVSAAADGAAQLHDGLIQLQAGTGQMGTGATEIADGVQNAVEQLGGLVVVQQQLLGALNEADKQLASSKIPEAEDLRKQITEVRGHLENFGISVEMTDQLDQLRSGTRDLANQLAVPGYGFHDGIYSATNGAAELSAGLQELEAGVGTAVEGFTALDEGANRLDSMATLNEEKTSAVQRALPVPQVPAGTIEGTADEERTSALAPMYAFLISALVMLAGAALGWATLKNKWLMAFAVIGVTAIGGIILFTVALGISIGALFGALGILLLATVVAGILSRILLDVLGTTGAIVVSVLGWVAQAAVIGHVWSVTAVSDIALVWRVVAGMMPLHYPTFAVTSIGNGGSAAAIWMSVAVLLAMGAIGAVALRKPKAVAVEVEEAVDADADQAASES

SEQ ID NO: 73 - DNA, 1045 bp, Corynebacterium glutamicum
  CDS (101)..(1015): RXA00614
cagtggtgtccttgtcgcgggccttcatagcggtggtcagatctgcgcggattttgtcttttagttcactcatgtttgcccagagtactccccaggtagggtgaataaggtgtcaactatcgctaaaacactcactttttcaagtgcagccctactcggagctggtatcgccaccgctgcatggggatactcagagctcaaaaaattcgagctcaaaacagtagaactgccaattttgaagcctggaacgctccgtggaaagaaggaattccgccttctccacatctctgatctccacatgatcccaggccaagaaaccaaaaaagcatgggtctccgcactcgattcactaagccccgatttggtgatcaacaccggtgacaaccttagcgatgaaaaagcagtccccgacgtcctccgcgcactcggcccactgatgaaccgccccggcgcgttcgtcttcggaaccaacgattactgggcaccccgccccgtcaatcctttcggctacctcttcggtaaaaaacgcgaagtgagccacatcgacctcccctggcgagccatgcgagctgctttcatcgaacacggatggcaagacgccaaccaaaagcgactcgaattccaagtaggttccgtccgcctcgccatctcaggtgttgatgacccccaccatgacctcgacgactacacagagatcgcaggggcaccaaacgtggacgctgatctgtccatagcgttgcttcacgcaccagaacctcgagtcctcgctcagttcgaagccgacggctaccagctttccctctccggccacacccacggcggtcagctttgtcttccgggcagcaagccaattgtcaccaactgtggaatcgaccgcaaacgcgccaccggcctcaacaaatttggcgacatgtggatgcacgtttccaacggcctcggcacctcaaaattcgtcccattccgcatcttctgccgacccagcgccaccctaataaagatcactgaacaggcactttgacctgaaaaacccacaggactacagtga

SEQ ID NO: 74 - protein, 305 aa, Corynebacterium glutamicum
VNKVSTIAKTLTFSSAALLGAGIATAAWGYSELKKFELKTVELPILKPGTLRGKKEFRLLHISDLHMIPGQETKKAWVSALDSLSPDLVINTGDNLSDEKAVPDVLRALGPLMNRPGAFVFGTNDYWAPRPVNPFGYLFGKKREVSHIDLPWRAMRAAFIEHGWQDANQKRLEFQVGSVRLAISGVDDPHHDLDDYTEIAGAPNVDADLSIALLHAPEPRVLAQFEADGYQLSLSGHTHGGQLCLPGSKPIVTNCGIDRKRATGLNKFGDMWMHVSNGLGTSKFVPFRIFCRPSATLIKITEQAL

SEQ ID NO: 75 - DNA, 883 bp, Corynebacterium glutamicum
  CDS (101)..(853): RXA00637
ccgatggcactttccgtacctggaaggtagttgcccgcggcagaaacaattagggaaacctcttgaccttcacgcgacgtcaaggatttaactaacagtcatgacagatcgaaccattggcgaggctgctgaactactcggtgtcaccacccgcacactgcggcattgggacagcatcgggttgcttcaaccgagctggcgaaccacaacggattatcgcctttacacagaagacgatgtcgagcgcgccctgcagattcttatttacagggccgccggaatcgggttgaaggatattgcggaggtgcttgatcagccggattcggccaatcagcacctgcgccgccagcgggaactcctagtggaacagatcggtcagctgcatcggatggtccgggcagtagatgaaatccttggaaaggatgcgattagcgtgaaggaaaagattgagatcttcggcgaggatctgcccaagtaccaagaggaggctttccagcgctggggcgacaccccggagtggaaagaatcccaaaagatccaggagaagatgaccaaggaggattttcagagggcgaaagatgaacatgaggggttcgtcgaaaagcttatcgacgcctccctgcgcggcatcgcgcccggctctgcagagggcaatgagctagcgcttgcgcaccgcgcaagcatcggtcagtggtacaccgtgagtgcaaacaagcaagtaattttggctcggatgtacgtggaagacgagcgttttaacgaaacttacaaaggacacgcctcatatcttttaacacttattgaagcattggcgcaggtagaaggcgtggacttggagaatgtggagtgggaataatcccaatttcaactctttcagtacatt

SEQ ID NO: 76 - protein, 251 aa, Corynebacterium glutamicum
MTDRTIGEAAELLGVTTRTLRHWDSIGLLQPSWRTTTDYRLYTEDDVERALQILIYRAAGIGLKDIAEVLDQPDSANQHLRRQRELLVEQIGQLHRMVRAVDEILGKDAISVKEKIEIFGEDLPKYQEEAFQRWGDTPEWKESQKIQEKMTKEDFQRAKDEHEGFVEKLIDASLRGIAPGSAEGNELALAHRASIGQWYTVSANKQVILARMYVEDERFNETYKGHASYLLTLIEALAQVEGVDLENVEWE

SEQ ID NO: 77 - DNA, 1432 bp, Corynebacterium glutamicum
  CDS (101)..(1402): RXA00654
gagatcaattcatatctcaaacattgtacatctgatcagcaatagcgattattgcttgattgtgtgtttttagatcttcggttctcttcactcaactgctgtgaagtgccacctgtttggaaaggcgaacacgatagtgctcgatattttgatttacccggtgtctggagtgatgaagctgtggcacctgcttcttcacaacgttgcgggtttggacgattcactggcgtggttcttttcccttttcggccttgtcatcacgatccgtgcaattatcgcgcctttcacctggcagatgtataagtcgggccgcactgccgcacatattcgtcctcaccgcgctgcgctccgggaagaatacaagggaaagtacgatgaagcgtccattcgggagttgcagaagcgccagaatgatttgaataaggaatacggcattaacccgctggcaggttgtgtgcctgggctgatccagataccgattgtccttggtctttactgggcacttctccgcatggctcgccctgaaggtggtttggaaaatcccgtcttccagtcgatcggcttcctaactcctgaggaagtggaatctttcctcgctggtcgcgtgagcaatgtgcctctgcccgcttatgtttcgatgcccactgagcagctaaaatatttgagcaccacgcaggcggaagttcttagtttcgttttgccactgttcatcacagccgcaatcctcaccgcaatcaacatggcgatgtccatgtaccgcagcttccaaaccaacgattacgcatccggattctctaacggcatgctgaagttcatgatcgtgatgtcgatcctcgcgccgatcttcccactgtcccttggcctcacaggaccattccccacagcaatcgcactctattgggtcagcaacaacctgtggacgctcctccaaacaatcatcatgatggtcattttggaacgcaaatacccacttaccgacgatttcaaagtgcaccacctagagcagcgcgacatctaccgcgcaaaacaaaaagaaaagcgcatcttcctgtggacacgacgcaaaaaccgcgccctgatgattctcaccccatggaacgcctcaacgcttcacgcaacaaacgtggaactcaccaaaacccgtactgccgaaatcaacgaagcaaaacaggcccgcaaagaaatcgcgaacaagaggcgcgaaacgcaacgtgaaatgaaccgcgccgccatgcagcgcttaaagcagcgtcgcgctgaggttaaagctaaaaagaaggggcttatcgacgcctcccccaacgaagataccccttcggaaaatgaagaaactaaattgagtagtccgcaggtggagccgacaacaactgccgagccaaatcgcgagccgtctcaagaggactgatgttgtggaccaatcgagatccagcaa

SEQ ID NO: 78 - protein, 434 aa, Corynebacterium glutamicum
VKCHLFGKANTIVLDILIYPVSGVMKLWHLLLHNVAGLDDSLAWFFSLFGLVITIRAIIAPFTWQMYKSGRTAAHIRPHRAALREEYKGKYDEASIRELQKRQNDLNKEYGINPLAGCVPGLIQIPIVLGLYWALLRMARPEGGLENPVFQSIGFLTPEEVESFLAGRVSNVPLPAYVSMPTEQLKYLSTTQAEVLSFVLPLFITAAILTAINMAMSMYRSFQTNDYASGFSNGMLKFMIVMSILAPIFPLSLGLTGPFPTAIALYWVSNNLWTLLQTIIMMVILERKYPLTDDFKVHHLEQRDIYRAKQKEKRIFLWTRRKNRALMILTPWNASTLHATNVELTKTRTAEINEAKQARKEIANKRRETQREMNRAAMQRLKQRRAEVKAKKKGLIDASPNEDTPSENEETKLSSPQVEPTTTAEPNREPSQED

SEQ ID NO: 79 - DNA, 865 bp, Corynebacterium glutamicum
  CDS (101)..(835): RXA00678
tgcgcagtgcactttccaggaaccaaaatatccccgccgaccttgctgcagatatttcgcagccgctgaaaaaactagccgttgacctggaggttacccgatgactcgcagtaatttacccgcttgggagcaagcagaccccagcgtccacgcctctgatccccgcgccatcacttttgcggaggattttgggattcgtcccatcccggccgtaggtccaattgataccaccgctatctgtgcaacaccttcaaatggatttgagcaattatggaaagccattgagccggaaacccgcacccgcgccaacgacattcatcttcccatcgtcgtggcgtacgctgaacgtctctgcgacgcttacccactggcagatagagaattggttctcgtagccgcaatcctccacgacacgggctgggcacatgtcgatgagagccgaatcatctccgaaggattctccggaaactggcgcaaagcagcaatccgcttcgaacacgaaacagaaggctgcactgtggcccgccgagtgcttccatccctcggatatactgtcgattttgtcgagcatgtctgcgacatcatcgacggacacgacacccgccaagtggcctactcactagaagacgctcttgttcgcgattgcgaccgactctggcgtttcgaccgcgccgggatcacggcttctagctcatggttcgggatgccagtctcagattatgtcgaccgcctgcacagggaaatcctcccagaattaatcaccgaagctgcacaccagatggctactgcagacctcaatcgtgcaaaggccctgttaagaacggatgcgatccgatgaatgctgcaaccaggcgtgcttctctgc

SEQ ID NO: 80 - protein, 245 aa, Corynebacterium glutamicum
MTRSNLPAWEQADPSVHASDPRAITFAEDFGIRPIPAVGPIDTTAICATPSNGFEQLWKAIEPETRTRANDIHLPIVVAYAERLCDAYPLADRELVLVAAILHDTGWAHVDESRIISEGFSGNWRKAAIRFEHETEGCTVARRVLPSLGYTVDFVEHVCDIIDGHDTRQVAYSLEDALVRDCDRLWRFDRAGITASSSWFGMPVSDYVDRLHREILPELITEAAHQMATADLNRAKALLRTDAIR

SEQ ID NO: 81 - DNA, 1201 bp, Corynebacterium glutamicum
  CDS (101)..(1171): RXA00691
gaattatcatcgccatcttggccatccttgccgccatcgctggtgtcatgggaccaatgatggctaacctgcagttttaacatctgagagaagtacagtgatgtctcgaacctcaacttttcacctgtcgctgaagtcttttgcagctgcagtcgcactatggattgttcttgccatatcgccatgggttccttctgcgcacgccttgaccacgccttgtgaagacgaccaagtgacagtgatggttgagggcaacaccatcggctgtgctgacgccggcggaaatggctatcaaacgcttcttgatgccggatttgatgtggaaaccaccgttcagtttccagaattcttgtgccgaatcaatgatttcccaggtcctgatgtggacgattgcatgaccgcatcacctgctgaagcttattggtcttattggcatgctcccctcggcggagatgaatgggaatacagcaaccttggagctttcctctactaccccaaacccggcactgttgaagcgtggtattggggagatactgatcgtcccggcgcgatcccggtgagtaaatctcaggcggagttggggttagactccgcggatccggattacaaaattgattttgatccaaatgatttcatcaccacaaccccaacctccgagtcccctatcgccgatttagggggtgacgaagagcccactgaaactactgaagctcctatcgcaggggctggagctggttcggcaagaggacaagcagctgaacccactgctgaggtaaaccctgagaaccctaatgaggtattggtgtatcaggattctgaaggaaactcgattactaaaggtcagtacgagaacttggttgctgcagcagccgctaagaccactgctgctgtccaagccccagctggggctggtgaagcaaatagccaaccgcaggcaacagcggtggcagaagctcctgaagttgatccgatgaccacgcaggttcttatggcgcctgcgggccaagatggagacgtcatggctgagggttcgacgcagcagacgtacgccacaggcacggtggattcttctgctcagggatggatcattggactcacactggctgtcatttccttggtttcagcgtctgctgtggcggcgtgggcgattcgtcgttcagaggtccagggttaaagcttcgtgaaatggattgagcgatat

SEQ ID NO: 82 - protein, 357 aa, Corynebacterium glutamicum
MSRTSTFHLSLKSFAAAVALWIVLAISPWVPSAHALTTPCEDDQVTVMVEGNTIGCADAGGNGYQTLLDAGFDVETTVQFPEFLCRINDFPGPDVDDCMTASPAEAYWSYWHAPLGGDEWEYSNLGAFLYYPKPGTVEAWYWGDTDRPGAIPVSKSQAELGLDSADPDYKIDFDPNDFITTTPTSESPIADLGGDEEPTETTEAPIAGAGAGSARGQAAEPTAEVNPENPNEVLVYQDSEGNSITKGQYENLVAAAAAKTTAAVQAPAGAGEANSQPQATAVAEAPEVDPMTTQVLMAPAGQDGDVMAEGSTQQTYATGTVDSSAQGWIIGLTLAVISLVSASAVAAWAIRRSEVQG

SEQ ID NO: 83 - DNA, 1759 bp, Corynebacterium glutamicum
  CDS (101)..(1729): RXA00719
cagatgatgcacacatcgtggacacctctgatatgaccatggatcaagtacttgatcacctcatccacctagtggaagcctccgctgaaaggagcaaccagtgactgataaacacaccatgcctggtgaagaggacgacaccgtattcgtctaccacacccacaaaggcgaaatggacgtcgaaggtgcgtttgctgacgaagaagaactagcaccacacggcggttgggcttccgcagatttcgacccagcagaattcggctacgaagactctgacgatgacttcgatgcagaggactttgacgaaacagagttctccaaccctgatttcggcgaagactactctgatgaagactgggaagaaatcgagaccgcattcggattcgacccaagccaccttgaagaagctctctgcacggtcgctatcgtcggacgcccaaatgttggtaaatcaaccttggtgaaccgctttattggacgtcgagaagcagtcgtggaagatttccccggcgtaacccgtgaccgcatctcctacatctctgactggggtggacaccgtttctgggttcaggacacaggcggatgggatcctaacgtcaagggcatccacgcatcgatcgcacagcaagcagaagttgctatgagcactgccgatgtcatcgtattcgtcgtggacaccaaggtgggcatcaccgaaactgactcagtgatggcagcaaaactgttgcgctcggaagtgccagtgatcttggttgcgaacaaattcgactccgacagccagtgggctgacatggctgagttctacagcctcggccttggcgatccatacccagtttcagcccagcatggacgtggtggcgctgacgttttggacaaagtccttgaactcttcccagaagagcctcgctccaagtccatcgtggaaggccctcgtcgtgtcgcccttgtgggtaagccaaacgtgggtaagtcttcactgctcaacaagtttgctggcgagacccgctctgtcgtggacaatgttgcaggaaccaccgttgaccccgttgactccctgattcagctggatcaaaaactgtggaaattcgtggatactgctggtcttcgcaaaaaggtcaagactgcatctggccacgagtactacgcatcactgcgtacccacggtgccatcgatgcagctgagctgtgtgttttgcttatcgattcctccgaacccatcaccgagcaggatcagcgcgtgctcgcaatgatcaccgatgccggtaaggcactggttattgcgttcaacaagtgggatctcatggatgaagatcgccgcatcgatttggatcgcgaacttgatctccagttggcacacgtgccttgggcaaagcgcatcaacatctccgccaaaaccggtcgtgcactgcagcgcctcgagccagcaatgttggaagcgctcgacaactgggatcgccgtatctccactggtcagctgaacacctggctgcgtgaagcaattgctgcgaacccaccaccaatgcgtggcggacgtttgcctcgagtgctgtttgccacccaggcatctactcagccaccagtgatcgtactgttcaccaccggcttcctcgaagcaggttaccgacgatacctggagcgcaagttccgtgaacgtttcggctttgaaggcactccagtgcgaatcgctgtgcgtgttcgcgagcgccgcggcaagggcggaaacaagcagtaaagcttgattttccctaaaagcacttat

SEQ ID NO: 84 - protein, 543 aa, Corynebacterium glutamicum
VTDKHTMPGEEDDTVFVYHTHKGEMDVEGAFADEEELAPHGGWASADFDPAEFGYEDSDDDFDAEDFDETEFSNPDFGEDYSDEDWEEIETAFGFDPSHLEEALCTVAIVGRPNVGKSTLVNRFIGRREAVVEDFPGVTRDRISYISDWGGHRFWVQDTGGWDPNVKGIHASIAQQAEVAMSTADVIVFVVDTKVGITETDSVMAAKLLRSEVPVILVANKFDSDSQWADMAEFYSLGLGDPYPVSAQHGRGGADVLDKVLELFPEEPRSKSIVEGPRRVALVGKPNVGKSSLLNKFAGETRSVVDNVAGTTVDPVDSLIQLDQKLWKFVDTAGLRKKVKTASGHEYYASLRTHGAIDAAELCVLLIDSSEPITEQDQRVLAMITDAGKALVIAFNKWDLMDEDRRIDLDRELDLQLAHVPWAKRINISAKTGRALQRLEPAMLEALDNWDRRISTGQLNTWLREAIAANPPPMRGGRLPRVLFATQASTQPPVIVLFTTGFLEAGYRRYLERKFRERFGFEGTPVRIAVRVRERRGKGGNKQ

SEQ ID NO: 85 - DNA, 2626 bp, Corynebacterium glutamicum
  CDS (101)..(2596): RXA00731
ttgataccgtggccggtggacattccttccaggtgtggcgcgtggctttagcgaatacttttgattgggttgccaagcgcggcggattgcaggtttaacaatgaaagacgcttcacagtcctacttattattcggtctgagatggctgggcaggtccctgcgtttcgcaccgttaagcctgctcatgatcgttgtcatgcggggtttgagggaagtgtttggcgccgaagatcccgcaaatagctctttggtagacaaccttgggctcaccctgccgtggtctcttaatgatccgcattttctcaccgcagggtttagcgcttccaccaccacagcagcgctcatgtccacgttgtggatcatcgtgtttgcggtgccctctgaacggattctgggcagcctcaaattcgcgatcacagcagcgcttatccacatcacttccattccgctgggcatcggcatcgcccacctcatcgaagaagccgatctcaaccgctggggcaacaacatgttggccgatgtgctgctcaccccagatttctgggtcttcggcgtcgccgctttcgcatccgcctccatgccactgctctggcgacggcgcacccgattgttcctctttactatcaccttgacgctgctgctttatacgggcacgcttgccgacgtcaccatgctcaccgcgaccatcatcggcaccgttgccggcgagttgaacaggcatcggaaaaccccaggtggccgctggcttcccggttccctcaccgtgcgtgaagcgcgcattatgacggccattttggtcactgccgtagcagcaggtccagtgcttgctgcgcttaatccactcacccacggccctttttccagtgcaacgaaattgatctggcagccccttgtcactgaagaacacatgcatcacctctgccacacagacagcacctctgatgcatgccaaggtgcgcttgatcagctccaacagcacggtgttggcccttccgttgccaacctgattccactgatcctcaccgtggtccttgcgatggggcttagccgcggacgtcgacttgcatggattttggcggttttggcccagctcatttccatcgcagtgttgatgttccagctgaccaaactatcggctgattccaccgatcttctatggtcagtcaatgcctttagcgtgatcgttccttggctggtggcgctcgccgtcttggtgttttcccgccgtgcattccaggtgaagattgataccacccggatttctaaatccttaggcgctctcatggttacatggttggcaacggcagcattgtggatccttgccacattgttcctgccacacgcattccacccacatccaacattggggctggctttcaaagaactccccttccgctatctcccaccaactatcgaaacggtgttaagccatcaactcttccccagaagccctgctgggtgggcagtgtttgaatggactggaacgctattctggctggtcgtagcagcaactctttatcatctgctcatgggtgtgcccagcaacaaagcgcacgaggaccaagaaaacgcagcgactctcctgcgctctggcagcggcgatcacttgtcctggatgaccatttggggtggcaatacgtattggtgggcaccagaaaatgcaggatatgtggcctaccgcgtgaaaaggggcatcgcaattacattgggtgagcctattctgggtccggattcatccgtctctaaagcagagctggccgcacagtttgaagaatttgccagcaaccaaggctggattgttgcgtggtattccgtttgtgaagaattctcaaaggaacgcatcaacgctggccaccacacacttcgtgtggctgaggaagcagtcttaagctcagctaatgcggatttcaaaggtaagcacttccaaaatgtccgcaccgcccgaaaccgcgcggccaaagagggcgtaagttccatctggacaacctgggctgatttgagtgccgaaatgcagcacaagatcatcacgctgtcggaagaatgggtctctgataaagctctgccggagatgggcttcacgcttggcactgtcaacgagctctcagatccagatacctatcttcttctcgcgattgatgaggaagagcatctgcacggtgtgaccagttggttgccggtctatgaaaaaggacgcatcgtcggctacacacttgatgtgatgcgccgtgatccgcaaggctttaaatctgtcatcgagtttctcatttccgaggccgtcgttatcgcaagggatcacgatctggaatggatgtcgatgtccggcgctcctttgagtacgcccccaggtgtggccgacgacggcaccatcggacaaattttggagcttttgggccgagcaatggagccgttctacggtttccgttccctcgctgcgtccaagaacaaattccacccagaacaccacggttggtacttgtgttaccgcgatgaattatcgttaccaagcattggccttgccgttgctgcctgctacctcaacgagtttccgctgccgaattggctgaaaaagaccgccacttccgccccaagccacagctagaaaaacgcgtaaccttggtgagaaacc

SEQ ID NO: 86 - protein, 832 aa, Corynebacterium glutamicum
MKDASQSYLLFGLRWLGRSLRFAPLSLLMIVVMRGLREVFGAEDPANSSLVDNLGLTLPWSLNDPHFLTAGFSASTTTAALMSTLWIIVFAVPSERILGSLKFAITAALIHITSIPLGIGIAHLIEEADLNRWGNNMLADVLLTPDFWVFGVAAFASASMPLLWRRRTRLFLFTITLTLLLYTGTLADVTMLTATIIGTVAGELNRHRKTPGGRWLPGSLTVREARIMTAILVTAVAAGPVLAALNPLTHGPFSSATKLIWQPLVTEEHMHHLCHTDSTSDACQGALDQLQQHGVGPSVANLIPLILTVVLAMGLSRGRRLAWILAVLAQLISIAVLMFQLTKLSADSTDLLWSVNAFSVIVPWLVALAVLVFSRRAFQVKIDTTRISKSLGALMVTWLATAALWILATLFLPHAFHPHPTLGLAFKELPFRYLPPTIETVLSHQLFPRSPAGWAVFEWTGTLFWLVVAATLYHLLMGVPSNKAHEDQENAATLLRSGSGDHLSWMTIWGGNTYWWAPENAGYVAYRVKRGIAITLGEPILGPDSSVSKAELAAQFEEFASNQGWIVAWYSVCEEFSKERINAGHHTLRVAEEAVLSSANADFKGKHFQNVRTARNRAAKEGVSSIWTTWADLSAEMQHKIITLSEEWVSDKALPEMGFTLGTVNELSDPDTYLLLAIDEEEHLHGVTSWLPVYEKGRIVGYTLDVMRRDPQGFKSVIEFLISEAVVIARDHDLEWMSMSGAPLSTPPGVADDGTIGQILELLGRAMEPFYGFRSLAASKNKFHPEHHGWYLCYRDELSLPSIGLAVAACYLNEFPLPNWLKKTATSAPSHS

SEQ ID NO: 87 - DNA, 709 bp, Corynebacterium glutamicum
  CDS (101)..(679): RXA00740
gttataaatattaaagtacgctaaccatgggtgcagggggagacttctacagcagtcatggtccacaccacgactgctgtatatattaaggacgtaactcatgttgaagaataaaactcttgcgctgctggctgtcagtacgctgatgtttggcttatctgcttgctctagtgatgctgacggcccggacagtagcggtgctagtagtagcagtactggctcatcttctgcatcggctgacacaacagattctgcagctgttgataaggatgctcaattagacacctttatgcgttctgctgtggctgatggatcatctgctgctgtggctgtggacaacgctgtaggtaagggctttgataaagctgatgcgcaggcggctgcggagcgcttgggtgatggtttccaattcgctgcggattaccaggctgttggctatttggaatcttggtactttggtggcgcgcgaagcgagaagcttgacgaggtgcgtagtgatgtcatcgctcatttgtctgaattgggatttacagatttagaggctgaatcctcggcatctcgtattacattaggtgattactgtgatggggtccctgagtattgtgagttgttttttgatggcgaatctcctgacttgtatgacatgggtacggagcttgactcgtataagcccactgaataaagctatttcacttaaagcaccccgctt

SEQ ID NO: 88 - protein, 193 aa, Corynebacterium glutamicum
MLKNKTLALLAVSTLMFGLSACSSDADGPDSSGASSSSTGSSSASADTTDSAAVDKDAQLDTFMRSAVADGSSAAVAVDNAVGKGFDKADAQAAAERLGDGFQFAADYQAVGYLESWYFGGARSEKLDEVRSDVIAHLSELGFTDLEAESSASRITLGDYCDGVPEYCELFFDGESPDLYDMGTELDSYKPTE

SEQ ID NO: 89 - DNA, 1225 bp, Corynebacterium glutamicum
  CDS (101)..(1195): RXA00812
gattttctgtgcctctgcattcgaaagtgaaaattattcacaggtgagcgtatcgcgggcggttgagaggtgagttatccacaggccgcagagggggtcgttgaaagcacgtaagcctcaggccacagtaggtgccatgaacaccatcacacaccaagcaattctcatcgcagtggaagatccggtcctgcacccagaggccatgcacgtagctgcagccactggtcggccggttattgaaacaacaaatttgatggacatctccaggcattttcaccgcacatcggcagtgctcattgatgcgtcgatggcctctcaattatcacctgggaaacgccgcgacagggtgtttcttctcgattctgatccagggccctctgattggaaaacggcgatgaaaatccacgctgagcaagccatgttgcttcccgctcaggcaggggagttgctcagcgctttaggcagagatgacaaacaactgccggtggcttcgggccatgtcatcggtgttgccggggtggtgggaggaacaggcgcgagcacgtttgctgcggcgctcgcaaagcggcgtgcggagtcagtcaccactgtgcttatcgacgccgacccttcctctggcggcatcgacctgttgctaggaatcgaagatgtgcccggcgcgcggtggcctgatgtggggttgcgtcgcggaactgtccaggctgctgatgtgttgaaagcgctgccgagcactcctgatgaggtcgtggtgttgtctacggcgcggtctaatattctggatccttttgcattatccgagtctgatgtttcggcggcgattgattgtttcttaagcgccgataggtcggtggatgtggtggtggatctgcctcatgcgagagtgcatccagatattgcggagcgcttatcccacctggtgttagtcatccctgcagaggtccgagcggtggctgctgccagggctcggtgtctggaattacaacaattgcatgtatccatcacgtgcgtgttgaggcatcgcgggtggtcaggtttggatgttgcagaagtggaagagattttaggtgcggatattaccgcggaggttggctcgatccagcggctggctaagtccgtggagatgcatgggctgaccggttctttgccgagggttttaagctcagcatgcgacgcggtcctcggggaggtggcggcatgactgacattgatctggtggtggaaaacg

SEQ ID NO: 90 - protein, 365 aa, Corynebacterium glutamicum
LKARKPQATVGAMNTITHQAILIAVEDPVLHPEAMHVAAATGRPVIETTNLMDISRHFHRTSAVLIDASMASQLSPGKRRDRVFLLDSDPGPSDWKTAMKIHAEQAMLLPAQAGELLSALGRDDKQLPVASGHVIGVAGVVGGTGASTFAAALAKRRAESVTTVLIDADPSSGGIDLLLGIEDVPGARWPDVGLRRGTVQAADVLKALPSTPDEVVVLSTARSNILDPFALSESDVSAAIDCFLSADRSVDVVVDLPHARVHPDIAERLSHLVLVIPAEVRAVAAARARCLELQQLHVSITCVLRHRGWSGLDVAEVEEILGADITAEVGSIQRLAKSVEMHGLTGSLPRVLSSACDAVLGEVAA

SEQ ID NO: 91 - DNA, 832 bp, Corynebacterium glutamicum
  CDS (101)..(802): RXA00831
agctccaagaaagtcagtgctgtgcatggctcggtgctgctcatgcttttcggtgtttacatgatgagcatgttcgcctgatttaggtagcctggtgggaatgagtgcacttgagacattgcaatggcaggactggtcaagcgtcttaattgtggtagctcacccagatgatccggagtatgggctttccgcggctgttaaagaatggacagacgccggggtggaggtgtcttacctgctgctcacccacggggaggcaggtatccaaggtttagaccctaaagaaaccgggtcattgcgcgcagcggaacagcgggctgcatgtgatgtggtaggagttagaaatctcaccattttgaatcacccagattccatgttggtgtacaatctggtactgcgcaaagatattgctcgggaaatccggatccgtaaaccaaatgctgtggtggtatccaattttgatgtagaggcctacggtggtttgaaccaggcggatcaccgcgtggcgggattagccgcaattgatgcgacccgcgatgccgctaatccgtgggcgcagccagagctgttgcaggaggatctgcagccgtggggagctgaagtcatcatcattgccggacacccagagcccacccacaccatggatctggctaaagattctgttgatgccggagttgcatcccttcaagctcacaaggaatacttggccgctcttccagatcccccgaagccggaggagttcattccggcgtttctcgaggtagagggcggttacgcagcggccttccgagttttcggacggtaagcagggcgatacgtgataggcagctta

SEQ ID NO: 92 - protein, 234 aa, Corynebacterium glutamicum
MSALETLQWQDWSSVLIVVAHPDDPEYGLSAAVKEWTDAGVEVSYLLLTHGEAGIQGLDPKETGSLRAAEQRAACDVVGVRNLTILNHPDSMLVYNLVLRKDIAREIRIRKPNAVVVSNFDVEAYGGLNQADHRVAGLAAIDATRDAANPWAQPELLQEDLQPWGAEVIIIAGHPEPTHTMDLAKDSVDAGVASLQAHKEYLAALPDPPKPEEFIPAFLEVEGGYAAAFRVFGR

SEQ ID NO: 93 - DNA, 1072 bp, Corynebacterium glutamicum
  CDS (101)..(1042): RXA00835
ccaacgatcgcaattttcatacctgctatcttgcctgagcacagataagatttgtaagcactaccccttctctacaaaggagtcatcaatggccggtggattggcagcactattagacgatgtcgcagcaattactcgagcggctgcagccagcctcgatgatgtcacggcgatggctggaaaaaccagcgttaaagccgcaggcgtggttgtagatgacacggcagttaccccgcaatatgttcaaggtgtcaaacctgcacgcgaactgcccatgatttggcggatcgctaagggctctttggtaaacaagatcatcatcattttgcccatcgcgttgcttctttccgcgtttgctccgtgggctctcacaccaattttgatgctgggcggctcctacctgtgcttcgaaggtgcagaaaagatctggcactccctccacaggcgcatcaaaggtgaacagcacagcaccgaacccaagtcgcaggaaagcccaaagtcagaggatcagctggtcaaaagtgccatcacaactgacctcatcctttccgcagagatcatggttatttcactcaatcagattgcagatcaaactatctggatgcaggctgcggttcttttcgtcgtaggtattggcatcaccgcgctcgtgtacggcgtagtcggtgttcttgtgaaaatggatgacgtcggacttacactttcaaagcgtgactccgcaggtatccagaaatttggccgcggcttggtcaaagcgatgcccatcgttcttcaagttatttctgttgtcggcgtttttgccatgctgtgggttggtggccacatcatggtcgttggaactgaagagttaggatgggaacttccctaccaccttgttcacggactagagtcctgggctaacggtatcggaggcagtgctctgggatgggttggcaatactttcgggtcacttgtgttcggcctcatttggggcgcgattatcaccgttgtggtcagtgtgatcaagaagttcattccacagcgtgcgcaaaactcgtctcattagtggagagttgttcgctgtaatttcgct

SEQ ID NO: 94 - protein, 314 aa, Corynebacterium glutamicum
LAALLDDVAAITRAAAASLDDVTAMAGKTSVKAAGVVVDDTAVTPQYVQGVKPARELPMIWRIAKGSLVNKIIIILPIALLLSAFAPWALTPILMLGGSYLCFEGAEKIWHSLHRRIKGEQHSTEPKSQESPKSEDQLVKSAITTDLILSAEIMVISLNQIADQTIWMQAAVLFVVGIGITALVYGVVGVLVKMDDVGLTLSKRDSAGIQKFGRGLVKAMPIVLQVISVVGVFAMLWVGGHIMVVGTEELGWELPYHLVHGLESWANGIGGSALGWVGNTFGSLVFGLIWGAIITVVVSVIKKFIPQRAQNSSH

SEQ ID NO: 95 - DNA, 2809 bp, Corynebacterium glutamicum
  CDS (101)..(2779): RXA00917
tgccgtggaagaaagcgctctttactgcgacagccgtcctattggtgtttgctgttgtgtggtcggccttggatattgccctgtgggtaggaaagcagtcatggtgaacacgttgaactctaaaaccgtgaatgtaccccgttttgccagaggcgttgttgctgcagccacagcgctattttttggcgctttggtaagcctcgcgcctagtgcgttggcgcaggaaccacctgcagttgaggccggagcgtcaggttctttgagcaacctgggtgcctgcatcgctgataaaggcactcttgatgtcatcatcatgatcgatgagacagaatccttgatccatgaagctcgtgacggcgtggtcaacgccaatgaaccaggcgcggacgcacagcaccaccgtgttcctgcagcacagagctttgtggatgagcttctagccaagcaaagcgatggtgatctgaacacccgcatccgtgttgctggtttcggccagacgtacaaatctggtgccactgatccagacaattacggagcatggacgcaactagatgcctccaccgttggcggagtacaagatgaaatctcccgcttcgctgaccgcacccaggagcagtacaccaactacgcctccgcgattgagggcgcttaccaggacttcactaggtccggctctgaggacgcctgccgcatgctggtgaccttcaccgacggcgcactgaccgctcaagaaggcgccgatgttgcagaagcagcactgtgcgcgccgggtggcgtcaccgatcgactgcgcagtgctggcatcacccacatcggcatcggtttatcggcacctaccaacccatctgatttcagcctgctgcgcggaaccaccgcaggtggcggaacatgtggtgtcgaaccagctaacggtgcattcttcccagcagataacgtgggcggacttttcgcagcattccgtgaagcccttgcgattggtggtgaaacaattggtgaaacccgagctggtgatcctttcagcttcaccctggacaactcggtgaactctgtgcgtttcaccgcgatcgccaaggatgatctcggcccgaacgcccacttggtgctcaccgcacccaacggcgaaacggttgagctcaaagattctggaagcagcgtcgccaacagcactgacgtgagttgggaagccgaaagcagcccagtaaaaatggctgatggttccctcaacctgcagcaaggtggggattggaagggtgtctggcagattcagttccaaggaattgatcctgcagcggttgatggacgcgtattcaactcagtggagatccagcctgacctccagcttgtgttcagtggcggtgattcgacgtcaggtgcacttaaccttcgcgatgatcagcagctgaatatgcagctggtgggccgtgatggtcagccacgcatccttgaggggtccgcgctggtcgatcttggtttcacccgcgcagataccggcgagttcgcccctttggctcaaggaattgatatttctggcggcgaattaagcttcccgctggatacgatttcgcagctcccagccatcggcacggtggaagcgcgtaccacgatcaccaccgcaggcgtcgatgatctccccggcaccacgttgagcccaattctcaacaccacgcgcatcaccatcactcagcgcgatatgcctcagctgccagcgtcggttcgcttcacagcggatgaggacgttgttaccgtagacatccccatcaccggccccggcaaggtatggattgcaccgggaacccagctcagcggagtgcttccagacggcgtggacggcattgcagcatcaagtactttcgacagcccagataatgctttggtgctcggactggatgagcagggcacgattcctgttgaactaaccgtgagcgatcttcgtgacggactggtcaacggctcgattccactccagatctccaacgctgagggcgccaatgaaaccagcgtggatctgccgacagaaggcacgttgagcgttcccattaacgcctccactttcgcattggcattcattttggcccttgtgctttccctcctgattccgctgctcattttgtatattgtgcgtttcctctccgcaaaggttccgtcctctgcgatgagtggcgtgcgcattccagtggaattctccggtgaagctctgcgctatgcgggcagcactatgcctgatctcgcatcgcaaaccaccgccaccaagcaggtcgttgttcatggagacaccttcaatgtggaaggccacaaacttaaagtccagcgcttccagctgaacccgattgcgtctcctgcagtgatcgtgcagaccgacccgtcgatcagcttcgacggcaaacaaaagggcacacaagctaaactcccgctggcggtccaaggcagttggttcctcactgcaagcggcgctgacccttccaagatggaactcatcgccctgacaaacctgccgctcgagcagggccaaatcgaccgcatgatcgcaggtatcaccagcaaagcccctgatagggcacgcgaactacaaaaattgcttgacgacgccgcgacctcccagcccgcaaaggttccaccgcgcgccccagccgcgcagggccacgtcgaaaagcaagctcctagttttggcactggttccggtggtggtttcggctccagcaatggtggaggctttggctccggtagcggatccaacgacacaaatggtggatttggttccagcggcggcttcggcgcgcgataacctgtaacttgcgattaaaaactaact

SEQ ID NO: 96 - protein, 893 aa, Corynebacterium glutamicum
MVNTLNSKTVNVPRFARGVVAAATALFFGALVSLAPSALAQEPPAVEAGASGSLSNLGACIADKGTLDVIIMIDETESLIHEARDGVVNANEPGADAQHHRVPAAQSFVDELLAKQSDGDLNTRIRVAGFGQTYKSGATDPDNYGAWTQLDASTVGGVQDEISRFADRTQEQYTNYASAIEGAYQDFTRSGSEDACRMLVTFTDGALTAQEGADVAEAALCAPGGVTDRLRSAGITHIGIGLSAPTNPSDFSLLRGTTAGGGTCGVEPANGAFFPADNVGGLFAAFREALAIGGETIGETRAGDPFSFTLDNSVNSVRFTAIAKDDLGPNAHLVLTAPNGETVELKDSGSSVANSTDVSWEAESSPVKMADGSLNLQQGGDWKGVWQIQFQGIDPAAVDGRVFNSVEIQPDLQLVFSGGDSTSGALNLRDDQQLNMQLVGRDGQPRILEGSALVDLGFTRADTGEFAPLAQGIDISGGELSFPLDTISQLPAIGTVEARTTITTAGVDDLPGTTLSPILNTTRITITQRDMPQLPASVRFTADEDVVTVDIPITGPGKVWIAPGTQLSGVLPDGVDGIAASSTFDSPDNALVLGLDEQGTIPVELTVSDLRDGLVNGSIPLQISNAEGANETSVDLPTEGTLSVPINASTFALAFILALVLSLLIPLLILYIVRFLSAKVPSSAMSGVRIPVEFSGEALRYAGSTMPDLASQTTATKQVVVHGDTFNVEGHKLKVQRFQLNPIASPAVIVQTDPSISFDGKQKGTQAKLPLAVQGSWFLTASGADPSKMELIALTNLPLEQGQIDRMIAGITSKAPDRARELQKLLDDAATSQPAKVPPRAPAAQGHVEKQAPSFGTGSGGGFGSSNGGGFGSGSGSNDTNGGFGSSGGFGAR

SEQ ID NO: 97 - DNA, 1042 bp, Corynebacterium glutamicum
  CDS (101)..(1012): RXA00943
taggtacgatcggacgaggagaaaaaatctgaaaacaatccagtggcccacctcggcttataaaactggacaacagtattttgattggagcatcaccataatgatccgcaaacttgctcgaccaatgcttgcatcggtctacgtcgcagatggcgcagaaacagtattgaacaccagcgcacacgtcgaaggcactcaggtagttctggatcgtatccgttatgtgctgccccgtaagtacgcaaagcgcatttccagagatccagaattggtcacccgcgtcattggcggcaccaaagtcggtgcgggttctttgctagctattggtcgtgcaccacgcacctctgcagctaccctcgcaatcctgactatccctaacatcctggctcgcaatgcgttctgggaaacccaggatgcggatgaaaagcgtaaccgccgcaacggtttcctcaccaacattgccctgcttggtggcctgtttatcacttctgttgatactgagggcaagcctggcgtgaagtggcgtgcaaccaatgctacaaagcgtggcaagaagcagctgcagcaggcacttccaaccaaatctgagactgaaaagttcggtgagaaggcctctgattggttcaacgatacttctgacaaggtcaccgagtacgcgtacaccgctcaggattttgtcggtgagaacaaggatgactggatcaagtccgcaaccgagactgctcacaaggtcgctgatactgtgagcgattacgctcacaaggctacctcttaccttgaggagaacagcggtgactggcttgaggctgcgcaggctaacgccaagactgctcgtaagtctgcagtgaaggctgccggcaaggctcaggaaaaggctaactttgctcttcaggtcgcagaggaaacctctggtcgcgccaacaagaaggcaactaagagctacgacaagcttcagaagcaggctgataaggccatcgatcgtgcacagaagaagctgaagggcatcgaactttaagtaacttcttcctgattgagaaaaaat

SEQ ID NO: 98 - protein, 304 aa, Corynebacterium glutamicum
MIRKLARPMLASVYVADGAETVLNTSAHVEGTQVVLDRIRYVLPRKYAKRISRDPELVTRVIGGTKVGAGSLLAIGRAPRTSAATLAILTIPNILARNAFWETQDADEKRNRRNGFLTNIALLGGLFITSVDTEGKPGVKWRATNATKRGKKQLQQALPTKSETEKFGEKASDWFNDTSDKVTEYAYTAQDFVGENKDDWIKSATETAHKVADTVSDYAHKATSYLEENSGDWLEAAQANAKTARKSAVKAAGKAQEKANFALQVAEETSGRANKKATKSYDKLQKQADKAIDRAQKKLKGIEL

SEQ ID NO: 99 - DNA, 967 bp, Corynebacterium glutamicum
  CDS (101)..(937): RXA00963
ctggctctgacggcgtcgacttgttctgcttctctgatacaccaattttcgaggcccttaacctcgcacgtacttttactccggaaggaatctagaacttatgcgtcttgcaacaatccgcaccaacggcaccaccattgctgctcgtgttgaatctgaaaacaccgctaccaccatcgagggctttgccaacgtcggtgaattactccaggaatccaactggcgcgagctggcagaaaacgctgctggtgaggctgtgacctttgaaaacaaggagctagatgcagtagttccagcacctaagaagattgtgtgcgtcggccttaactacgccaaccacattaaagaaatgggccgcgacctccctgataccccaaccctttttgttaagttccctgacgcgctcatcggacctttcgatgatgttgtcgttccagagtgggctaacaaggctctcgactgggaaggcgagatggcagttatcattggcaagcgcgcacgccgtgtcaagcaggccgatgctgctgagtacatcgctggctacgcagtgatgaacgattacaccacccgcgatttccagtacgcagcacctgcaaagactccacagtggcaccagggcaagtctttggaaaagtccgctggcttcgggccttggatgactaccccagattcttttgagttcggcggcgagctggcaacctacctcgagggcgagaaggtacagtccacccctaccaatgacctggtctttagcccagaaaagctcatcgaatacatcacccacatctacccattggatgctggcgacgtcattgtcaccggtaccccaggcggcgttggccacgcacgtaacccacagcgctacatcggtgacggcgaaaccgtaaaggttgagattgcgggcctcggcttcattgaaaacaagacggtgtttgaataaatgacaactttccacgatcttccgctg

SEQ ID NO: 100 - protein, 279 aa, Corynebacterium glutamicum
MRLATIRTNGTTIAARVESENTATTIEGFANVGELLQESNWRELAENAAGEAVTFENKELDAVVPAPKKIVCVGLNYANHIKEMGRDLPDTPTLFVKFPDALIGPFDDVVVPEWANKALDWEGEMAVIIGKRARRVKQADAAEYIAGYAVMNDYTTRDFQYAAPAKTPQWHQGKSLEKSAGFGPWMTTPDSFEFGGELATYLEGEKVQSTPTNDLVFSPEKLIEYITHIYPLDAGDVIVTGTPGGVGHARNPQRYIGDGETVKVEIAGLGFIENKTVFE

SEQ ID NO: 101 - DNA, 1363 bp, Corynebacterium glutamicum
  CDS (101)..(1333): RXA01011
cccgcaaaccgatttcactcgccgactcatcgacgcgatcccaggatcgcgctatcgtggtggcgaactcaatcttggactataggagcagatcttaaaaatgtcagatctcatcgacatgctggttggagaagacctcccacagctgcgtgacaaccgtccccaagctcgcgacaatgcacaaaagagcttcgaagctctgctcgaaccggtcaacccaggaaccttcagcttcggcgagcgttacgccgtggccacctatgttgcaggtttgcaccaattcgcgccagctgtagatctctaccaagatttgcttctcgacgacgccccaaccaccctggcaaacgccgtctccgatgccatcgacgagggcctatccgcaggcccatacggcacctaccgtgaacctggacttgagtccgaatcagagccaggcggatctgtgcgcaacgatgccgccaagcttggcgagcgacttgcagcagcatttgattacgcacacctactagttttccacccccgtgattcccgccccgaggtccttggtcgactctccggcgctggctggagcgcggatgacaccgtgacattggctcagctggtgtcgttcctggcattccagctgcgtgttgcctacggcctgcgcaccctcaaaggtgaagacattcaggtgaaagctcctcgcctgagtattcctgaagcgaagtgggaactgtccaacaacggctttgagatctccacctatgaagaactcaaccgccctgaagcgtttgtgaaccactctttgggctggaagccatgggtaccaccagtagcaaaggcagatctcaccgaagaacagctggattctttgatccagcctgagcgcgctgatatgccatacttccgtctcttggcacgcgatcctgcagcattgaaggcgcgtaccctgaccgatctggatatcttcttcaacactgacggcgaaggcctaggacgtgcagagcgtgaactcggcgccaccgttacttcccgctacaacggctgcgtgtactgcgcatccgtgcacgcaggacgtgctcaggaagaatccggtcgagctgatgatgtcaacgcactgttggcaagcatcgactccgatctgggttctgaccagtggaatgtcatccgtgacgctgctcgcgcactgagctccacccctgctgctttcaaccagggatgcatcaccaagctgcgtggcgttggattcagcgacctgcagatcgtggacttgatcaactctgtggcgttcttcaactgggcgaaccgcctgatgttgtcactgggtgaacccgaagtgccaaagcgtttcctgtaaaacgcataaccccgaataccccctgtt

SEQ ID NO: 102 - protein, 411 aa, Corynebacterium glutamicum
MSDLIDMLVGEDLPQLRDNRPQARDNAQKSFEALLEPVNPGTFSFGERYAVATYVAGLHQFAPAVDLYQDLLLDDAPTTLANAVSDAIDEGLSAGPYGTYREPGLESESEPGGSVRNDAAKLGERLAAAFDYAHLLVFHPRDSRPEVLGRLSGAGWSADDTVTLAQLVSFLAFQLRVAYGLRTLKGEDIQVKAPRLSIPEAKWELSNNGFEISTYEELNRPEAFVNHSLGWKPWVPPVAKADLTEEQLDSLIQPERADMPYFRLLARDPAALKARTLTDLDIFFNTDGEGLGRAERELGATVTSRYNGCVYCASVHAGRAQEESGRADDVNALLASIDSDLGSDQWNVIRDAARALSSTPAAFNQGCITKLRGVGFSDLQIVDLINSVAFFNWANRLMLSLGEPEVPKRFL

SEQ ID NO: 103 - DNA, 739 bp, Corynebacterium glutamicum
  CDS (101)..(709): RXA01017
gaaatttgagggggcgctacccttagaaggtgcgcaatgacaccacgatagttcgcgcctagtgtggattgctagaaaactttaagaaagaggaaataatatggctcaaaaagtaaccttctggttcgataccacctgcccattctgctgggtcacctcccgctggattaaggaagtcgaacaagtccgcgatattgaaatccagtgggttccaatgagcctcgctgtcctaaacgaaggccgtgatctcccagaggattacaaggagcgcatgaaggctgcatggggaccagcacgcgttttcgcagctgtcgccaccgaccatgctgacaagctcggcgacctgtacaccgcaatgggtacccgcatccacaacgacggtcgcggaccaatcgaaggttccttcaatgatgtcatcgcagaggcacttgaagaggtcggcctagacgctgcacttggtgaagttgcagacaccaccgaatgggacgacgcacttcgcgcattccaccagaccgcaatggacgaggtcggcaacgatgtcggaaccccagtggtcaagctcggcgacaccgctttcttcggcccagtgctcacccgcatcccacgcggcgaggaagcaggagagatcttcgacgcttccttcaagctcgcaagctatccccacttctttgaaatcaagcgcagccgcactgagaacccacagttcgactaattaacgctgtctctgcttattaaacac

SEQ ID NO: 104 - protein, 203 aa, Corynebacterium glutamicum
MAQKVTFWFDTTCPFCWVTSRWIKEVEQVRDIEIQWVPMSLAVLNEGRDLPEDYKERMKAAWGPARVFAAVATDHADKLGDLYTAMGTRIHNDGRGPIEGSFNDVIAEALEEVGLDAALGEVADTTEWDDALRAFHQTAMDEVGNDVGTPVVKLGDTAFFGPVLTRIPRGEEAGEIFDASFKLASYPHFFEIKRSRTENPQFD

SEQ ID NO: 105 - DNA, 658 bp, Corynebacterium glutamicum
  CDS (101)..(628): RXA01037
cgactaaaccgcatcgcttcatggaaatcagccggcgtacagcgctatctcaaccccactatctcttagaaccacacacaaccaagaaagcagtcactacatgaccacctcatcaccccttaagtccaaaaattcccttaacggcgcgcagaccacatttgtccgcaattgtgttgcagacggcccaaccgaggtaaaagccaccattgatgcacgtggcggtatcgaacagctccgtgacaatgagatttcacagctccccgacaagctgtggttcaatagcgcaacctccgcatccaatgacgagttcaccaccgataacatccgacttgggttgctctacaacatggcactgaataaggcatcggctcatcgctatgagcttgctgcccgctggtacgccattgttagccctcagccatcgcaagaagctagccacaagcgcatcgcgtcctggcaccttacccagctgcacgcactggtgaccctatctcgcaccctaggggtcatcattcctggtgatgagatcgacgctctagcgcagtctatggagaatgctcgtcaagttggcaccgagaattggtccactgtcaccatgcgcacctacgtgaccaaccgcaaggcatcctaatgactcgcgatattttccacgaggctg

SEQ ID NO: 106 - protein, 176 aa, Corynebacterium glutamicum
MTTSSPLKSKNSLNGAQTTFVRNCVADGPTEVKATIDARGGIEQLRDNEISQLPDKLWFNSATSASNDEFTTDNIRLGLLYNMALNKASAHRYELAARWYAIVSPQPSQEASHKRIASWHLTQLHALVTLSRTLGVIIPGDEIDALAQSMENARQVGTENWSTVTMRTYVTNRKAS

SEQ ID NO: 107 - DNA, 2038 bp, Corynebacterium glutamicum
  CDS (101)..(2008): RXA01046
actcggcgtacacggaaaatagcagctgatccatctagggtcagtgaactctcgcggattgccacacaccaccaaccactacaagaaagaaccccctaccgtgccttttcacgatttcactgaccctgatagcgatcctaggcaaaatgcaccagctaaccccaccgctcaaccgccatctgcccccacctcacactcatcacagcagggtctccctccgggcgccattatgatcccttttccagggcaaccgcagcagcaaagcgcacccaatgacgagacccgtttcatcgaccttaacgaacgtcataaagatgatgaaccagccctgtttcgcgatgatgttattgatcaaactctcgctattttgatcagtaaaaataagcccaatgcgctactcgttgggcctgccggtacaggtaaatcccgtatcgcagaagatattgcgcgccgccttgccaatgatgacgtatctattcccgatcagcttgtcggccaccgtattcttgatgtctccattgcagagcttgttgctggtgctggcgttgttggtcagctcgaagaacgcattctggatctcatcaagtatgcgaccgacccgagtaacaaagtcattatctttattgacgagattcaccaaattgctggtgatcagtccagtcacagtggatcgcaagccaaagttgctcagattctcaaaccctatcttgcccgtggtgaccttcgtgttattggtgccaccaccacccaggaagctcgtgacttcgatcatgatccagccctcaaacgccgttttagcagagtaaatgtcgatgaatttgatcgagatcaaacgctcactattcttcatgctgcacgtgatggttacctcaaacatttcaacaacgctgtcacggtatctgacgacgtactgggctatgtctacacctactcgcagcaattcaacccaggcaatacagcacaacctgatgcagcactgacgctgtttgataaggcgttggcttccctaactatggagaaacagcgtctgatcaacaaccatgtcattgcgccgtcgctcaagttccctgtgtcagaaaggcacatccataacaccgctcgcaaacttgcctttggctctcaagtgccagcctccatcaatactgatgatgctcgtgacaaactcgaaacgttgtttggtcaagatcatattattgagccagtactcaccgctatcaagcgtgaacagcttggtattttccctcgcaccaaaccattgagctgggtgtttgctggttcatctggtgtgggtaaaacagaaatggcgcgtattctctctcgcgccattaatggcggcgatcccatcattatcaatggtcccgaatacattagtcctgagtccattactggccttatcggatcatccgatggctatatcggctctaattctaagcgtgctaaaccactcgacccgctgatttctaatccgcgtcaggtgattgtgctcgatgaatttgagaagtctcaccctcatttccagcaattgttcatggcagctcttgatacaggcactatggcgatggctaatggcacgacattgaatttctctcaggccattatcattgccaccaccaatgcagcccgcgacaaaatcggtcgtgacagctttggattcgattcagataattcaggtgtcctcggttctgctcaagcagcaactgatccgcgtgcacaggaacgcctcaagtcactgatgtccaaggatttccctgttgaactgctcaaccgtttccagaatatctttgccttcaaccgcattgatgcaggcacctaccgtgagattctggacaatctctaccagcgtcgccgtgacgccgtgctgcttagccacccgcattacgcagcacagatccctgcagatattgattcagacactcttgatcagctggtggaaaccacctttatctcagattttggtgcacgtcctgctgcacgcaccatcgaagaccacatcgcatccttgctgatgtgaccaaccttttaggagtacatcatgatt

SEQ ID NO: 108 - protein, 636 aa, Corynebacterium glutamicum
VPFHDFTDPDSDPRQNAPANPTAQPPSAPTSHSSQQGLPPGAIMIPFPGQPQQQSAPNDETRFIDLNERHKDDEPALFRDDVIDQTLAILISKNKPNALLVGPAGTGKSRIAEDIARRLANDDVSIPDQLVGHRILDVSIAELVAGAGVVGQLEERILDLIKYATDPSNKVIIFIDEIHQIAGDQSSHSGSQAKVAQILKPYLARGDLRVIGATTTQEARDFDHDPALKRRFSRVNVDEFDRDQTLTILHAARDGYLKHFNNAVTVSDDVLGYVYTYSQQFNPGNTAQPDAALTLFDKALASLTMEKQRLINNHVIAPSLKFPVSERHIHNTARKLAFGSQVPASINTDDARDKLETLFGQDHIIEPVLTAIKREQLGIFPRTKPLSWVFAGSSGVGKTEMARILSRAINGGDPIIINGPEYISPESITGLIGSSDGYIGSNSKRAKPLDPLISNPRQVIVLDEFEKSHPHFQQLFMAALDTGTMAMANGTTLNFSQAIIIATTNAARDKIGRDSFGFDSDNSGVLGSAQAATDPRAQERLKSLMSKDFPVELLNRFQNIFAFNRIDAGTYREILDNLYQRRRDAVLLSHPHYAAQIPADIDSDTLDQLVETTFISDFGARPAARTIEDHIASLLM

SEQ ID NO: 109 - DNA, 772 bp, Corynebacterium glutamicum
  CDS (101)..(742): RXA01109
gggtcgtcagctagattgctttgctagggtaatctgcgtgaaccgtccgggaatttttaagttttccggagcatgtcgatgatttatcaggagcagaactttgtctattagcctttcctcaaagaaggttgctttcgcagcactcatggtcaccccacttctcttgaccgcatgtggcagtgattcatctgatactgaagcagcctcatccagcgcagcgacgacgacaaattcttcctcatccagcgcagcgacctcggcggaagcagcagaaaccacctcgtccgaatctgaatcttccgaagcaacaaccatcaacgaagagcagcaagcacagcttgatgtactgtctcaagagctgtctgagaacccaattaccttcgctgaagctgcgccagttgaaaacggcgagaccgcttccccagaagacacagctgccatcgaggctctggttcgcggatacactgacaccaacaccttgcgtagctcccttgcgtacaccatcaacaacacctgcacccgcgttcttgaagccagcggcgctgacgctacccagcttgatctcaacaccatccctgatatcccactgggtggcgaaggcaccggaactgttgattccatcaccgatgttgtggtcaacggccaggaagcatccgcatgggtcgtagcaaccgccggtggaaccaccgactctgcaacccagcgcttcttcaacgaaggtggccagtggaagttctgcgactaatccacagagcttaaaactccggttgtc

SEQ ID NO: 110 - protein, 214 aa, Corynebacterium glutamicum
LSISLSSKKVAFAALMVTPLLLTACGSDSSDTEAASSSAATTTNSSSSSAATSAEAAETTSSESESSEATTINEEQQAQLDVLSQELSENPITFAEAAPVENGETASPEDTAAIEALVRGYTDTNTLRSSLAYTINNTCTRVLEASGADATQLDLNTIPDIPLGGEGTGTVDSITDVVVNGQEASAWVVATAGGTTDSATQRFFNEGGQWKFCD

SEQ ID NO: 111 - DNA, 652 bp, Corynebacterium glutamicum
  CDS (101)..(622): RXA01122
tattcgaccaaggctgagcaaaaaggcgctaagctgtggggagatcgcaagcccctatccggcctctactaagccccgaagttgaagggaaactcccccaatgccgtttccagcactgttgttgccgctgattttctggacaggaattgcagctttgtcctcttgggcggtcagccgtgcacttccgctgcgcgccgataattccattgagattgatgcgccggtggaaaaggtctgggatttcatcgaggagaccaaccgcgtgccggagtggaatgagcacattctgtacgtgcaggcgcctggtgagatcgagcagggcatgaagctcaagatgaaaacaaggcacccagagaccaatcgcctcactttgaagtttcgccccaccatcgacgtgctgcgtccacaccgtgaattgacgtggtccaccaaaattgttgcgcgttggctgctcaccgtcaccgacacgatcgagctgaagcctttggaagatggtcgcactgaggtggatcaatcaatgtcctttagtggcgtactatcccccggagtgccctttttggccagcatcagcaggatcaaagagaactcaaaccgccagttgaaagcactgatcgaagccgagtaaacctccaacccctacataacgtggggg

SEQ ID NO: 112 - protein, 174 aa, Corynebacterium glutamicum
MPFPALLLPLIFWTGIAALSSWAVSRALPLRADNSIEIDAPVEKVWDFIEETNRVPEWNEHILYVQAPGEIEQGMKLKMKTRHPETNRLTLKFRPTIDVLRPHRELTWSTKIVARWLLTVTDTIELKPLEDGRTEVDQSMSFSGVLSPGVPFLASISRIKENSNRQLKALIEAE

SEQ ID NO: 113 - DNA, 1171 bp, Corynebacterium glutamicum
  CDS (101)..(1141): RXA01127
aacgatttccagttgagtcaagccctgcatgatggggtagtgggggttgttgggcaggtacgagctgtgatcaatcagctacactagtgaagtccatatagtgagaagggaatcccacaacatgaaacttgctgttattggtggagatggtatcggcccagaggttactgcagaagccctcaaggttctaaacgctgtccgcgacgacatcgagaccaccgattatgaccttggcgcacgccgttacctcaaaaatggcgagctgctcaccgacgaggatctggcatccctgcgcgagcatgacgcgatccttcttggcgctatcggtgcaccaggttccgtccctccaggaattctcgagcgtggtttgctgctgaagatgcgattcgcactggatcaccacgtgaacctgcgcccatccaagctgtacgacggcgtggagtccccactgcgtaacccaggcaagattgatttcgttgtggtccgcgaaggtaccgaaggcgcctacactggcaacggtggagcaatccgcgtgggaacccctcacgagattgccaatgaaacctccgtgaacactcgctacggcgctgagcgcgttattcgctacgcattcgagctggcacagagccgccgcaagaagctcaccctcgtgcacaagaccaacgtcctggttcacggtggtggcctgtggcagcgcaccgtagatgaggttgcaaaggaatacccagaggtagccgtcgattacaaccacatcgatgcagcaaccatctatctggtcactgatccttcccgcttcgatgtgattgttaccgataacctcttcggcgacatcctcaccgatgaggcaggcgcagtctctggcggaattggcctcgcagcatccggcaacatcgatgccacgggcaccaacccttccatgttcgagccagtccacggctctgcaccagatatcgcaggccagggaatcgcagacccaacggcagcaatcctatccgctgcgatgctgctgcgtcacttaggtgatgaagacaacgcagtacgtattgaaacagccatcgcagctgatgtggctggccgagataactctcagccgatttctaccactgaggtgggagaccgcatcgtcaaggcgctgcaaagctaaatttcaacgccgacccccttgcctttt

SEQ ID NO: 114 - protein, 347 aa, Corynebacterium glutamicum
VRRESHNMKLAVIGGDGIGPEVTAEALKVLNAVRDDIETTDYDLGARRYLKNGELLTDEDLASLREHDAILLGAIGAPGSVPPGILERGLLLKMRFALDHHVNLRPSKLYDGVESPLRNPGKIDFVVVREGTEGAYTGNGGAIRVGTPHEIANETSVNTRYGAERVIRYAFELAQSRRKKLTLVHKTNVLVHGGGLWQRTVDEVAKEYPEVAVDYNHIDAATIYLVTDPSRFDVIVTDNLFGDILTDEAGAVSGGIGLAASGNIDATGTNPSMFEPVHGSAPDIAGQGIADPTAAILSAAMLLRHLGDEDNAVRIETAIAADVAGRDNSQPISTTEVGDRIVKALQS

SEQ ID NO: 115 - DNA, 1192 bp, Corynebacterium glutamicum
  CDS (101)..(1162): RXA01128
tgagattaaccataaaagaaaaactgcctcattgtctcgaaatcctgcattcgagtacaaataaatttgagaacaaaaagatggggggaaatatgttaaagtgcgttatattgctttagcgaaagtaacttccatgcatcaacgttcgatgagcttcactttcattcgtacttttttcgtactttttggcatcacgttgttagtgtcatgcgttccagagcctcctgactcctacactaaagaatccactgtgctgcggtatcaggtctctgatttcaatctaaacttcgtggaattagcagttgcgcttgggtatttgaacaacattgagctccaagtagtcggatctgtacaaggcggcgttgagtccattgaatcgctcaaaaaggatgacattgacttcgcggcagtccccttcattggccttgttgcaggagagatagccaccggtgcgcccatcaaagcagtggccgcaagttacggaatttcccacgattcttcttctgcacttctagtccttaaagacagtgagatacacgaagtgcacgatctcattggcaaaacagttggcataaacaccctcggtgctctgggatctgcgatggttgagcgtcatctattcgacgccggtctcaccgaacctgagatcgtgagcgtcactcaacgtgcattacccggtgagtacttagaacaacgcctctaccaggggcaagttgatgcaatttgggtcaccgatagcgctaaacaccaagcgcttgaaactggagattttcggatcttggcagaggattcagaccttgtgcaggaactcaacactggctgcatggtggtgtcgcaaaaactcatcgacgagcaccccgcagtggttggagaattagtggatggagtagctcaggcaatcgagtttgaacgatcccactcccctgaagaagtgcgcgaagtttatttcaactacctcgaagcccatggtcagagtgatagaatatccagctttagatattgggagcattcgggcatcgcaacccgaggtggagtgctcagtgatagggagttcagcatgtggtcccactggattgaccgccaatacgacgtccccgatatcaatccagcaagtatttacaccaaccaattcaacccataccgaaaagtaaacccctcgccataaaaggcaagggggtcggcgttgaaattt

SEQ ID NO: 116 - protein, 354 aa, Corynebacterium glutamicum
VRYIALAKVTSMHQRSMSFTFIRTFFVLFGITLLVSCVPEPPDSYTKESTVLRYQVSDFNLNFVELAVALGYLNNIELQVVGSVQGGVESIESLKKDDIDFAAVPFIGLVAGEIATGAPIKAVAASYGISHDSSSALLVLKDSEIHEVHDLIGKTVGINTLGALGSAMVERHLFDAGLTEPEIVSVTQRALPGEYLEQRLYQGQVDAIWVTDSAKHQALETGDFRILAEDSDLVQELNTGCMVVSQKLIDEHPAVVGELVDGVAQAIEFERSHSPEEVREVYFNYLEAHGQSDRISSFRYWEHSGIATRGGVLSDREFSMWSHWIDRQYDVPDINPASIYTNQFNPYRKVNPSP

SEQ ID NO: 117 - DNA, 1996 bp, Corynebacterium glutamicum
  CDS (101)..(1966): RXA01129
caatataacgcactttaacatatttccccccatctttttgttctcaaatttatttgtactcgaatgcaggatttcgagacaatgaggcagtttttcttttatggttaatctcatgtcggtcgaactcgaagaaatccgcgatttcttagcaggatttgaacctttcgcgcagctaccagccgaggaactagatcagttacctggaaaaatgagcttgcgctattttcggcgtggggaagagatcatcccaattggtgtgcccaatcattacatgggggtaatcagatcgggtgccattgatgttcttgatcaggagggcgtactgctggatcgccgtgacgcggggcgctcgtttggctattccacgatggggccagaacgaaattctcggtaccgtatggttgccgtggaagattccttggtgttgcgtctggggcgtgatgattttgatgagttagccaagcgcaaccctgatctgaaccgttactactccagctggtcgaagcgtatccgcgccgctgctgatcaattgcgccaagaatctagttcgaaggtgctgcgcacgaagttgggggagttcaagatcgccaacccgatttcctgcagcccggacaccacgatcatggatgctgccatcaagatggatgagttcggggtgtcttcgttgctggtgcagatcgatggggaactcaaaggcatcatcaccgatcgcgatatgcgcagcagggtggtggcgaaggatttggatattcagctgccggtctctgaggtcatgacggtggatccgcgttgcgcgacctcgcaggggttggcttttgaggccatgttgttgatgtcggagctgcgcattcaccacttgccgattgtggatgatggccaaatctccggcatcgtcactgcagctgacatcatgcgcttgctgcgccacgatccgatttacctcactgcggatctgtcgcgaaaaaataccgtggaggaattggccaacaccttccagtcggcagcggaggtggcttcgagatttattgatcggggagcttctgcggaagaagtcagtagcttgctcaccgtggctgcggattctttggcaagaaggctccttgtgctggcggagcggaaatttggtgcaccgccagttccgtattgctttgtggtggtgggctcgcagggcaggaaagaaatgggactggcctctgatcaagacaatgcccttgttctggacaattcctacaatgaccgcgagcatggacagtattttgcagcgctgagtgaattcgtgtgccagggcctcgaccgcgcaggacaggtgctgtgtccgggtgacatgatggcatccaatccggagtggcggaaaactgctgaccagtggatctccaccttccattcctggattactgcgccggagccggatgcgttgctgcatgcccagacattctttgatttcaggggaatttacggcgacaccgagatggctaaggatgtccaccaaaatgcggtgaatatggccaggggtgcgcgtcgcatgcatgcacacttggctagtcttgcggcccggcgcgatcctccgctggggtttttccgtggtcttgtggtggagcgttctggtgaatacggcgcgacgatggatattaagaagggtggcaccgcgggcatcgtgcagatggcgaggctgtatgcgctggccacgggtagtgatgcgattgggactcgggagcggttgattgctgcgtcgggccatggtcaggtgtcgcgtaagggtgcgcaggatttgttggatgcctttgatttcttagcggcgatggcgttccagcaccaggcgcggttgatcaaggtgggggagaagccgaactatcacattgatcccaagacgttgggcaagatggatcgggagcatttgcgcgatgcattttccattattaaagatatgcagtcggcgttagctactaaatatccggtgaggaacatctagtgttggggcgtcgaaaagcgaaaatac

SEQ ID NO: 118 - protein, 622 aa, Corynebacterium glutamicum
MVNLMSVELEEIRDFLAGFEPFAQLPAEELDQLPGKMSLRYFRRGEEIIPIGVPNHYMGVIRSGAIDVLDQEGVLLDRRDAGRSFGYSTMGPERNSRYRMVAVEDSLVLRLGRDDFDELAKRNPDLNRYYSSWSKRIRAAADQLRQESSSKVLRTKLGEFKIANPISCSPDTTIMDAAIKMDEFGVSSLLVQIDGELKGIITDRDMRSRVVAKDLDIQLPVSEVMTVDPRCATSQGLAFEAMLLMSELRIHHLPIVDDGQISGIVTAADIMRLLRHDPIYLTADLSRKNTVEELANTFQSAAEVASRFIDRGASAEEVSSLLTVAADSLARRLLVLAERKFGAPPVPYCFVVVGSQGRKEMGLASDQDNALVLDNSYNDREHGQYFAALSEFVCQGLDRAGQVLCPGDMMASNPEWRKTADQWISTFHSWITAPEPDALLHAQTFFDFRGIYGDTEMAKDVHQNAVNMARGARRMHAHLASLAARRDPPLGFFRGLVVERSGEYGATMDIKKGGTAGIVQMARLYALATGSDAIGTRERLIAASGHGQVSRKGAQDLLDAFDFLAAMAFQHQARLIKVGEKPNYHIDPKTLGKMDREHLRDAFSIIKDMQSALATKYPVRNI

SEQ ID NO: 119 - DNA, 745 bp, Corynebacterium glutamicum
  CDS (101)..(715): RXA01173
agatctgtttctatgtattaaagatcacaccgagtggtggaatttcctcaagtgatttacccacaatggactttgttgatacccaattcgagaaaggccaatgcacgtgagcactcttccaaacaagaaactgcgtactcgcattttcgcaggcaccgctgccgtcgcactgtcacttggtgttgcgtcttgctcaaacgcagaagatgctgtggatagcgcaacagatgctgccaactctgcaacctccgccgcgggatctgcaattaacgatgccaccggcacttccagcgcatccaccacagagccttccggaacctctggatccgactccgggtctgactctgctggaggagacaccactgaagtagaaagcgccgatgggtccaccatcagcatcccaactgccgtcgtcaccgctgcaaatgctgcaggattcagtaccccggaatccgtggaagaaggcccgaatggtgagtcattggtgacgttccctgaaggctacattgttaactctgcagaaggtggtgcacaagcactggtcggcatgatcggtgaaacctggatcggcgaaggcggactatccgcggcagtgggtctcccaactgggcctgaagaagcaacaacaaatggttggactcaacagttcacatctggagtaattagctggcttgatgatggatcaggacagttcgcagcttctgttgaacctgcttaagggaatctcacctggcctcctttggca

SEQ ID NO: 120 - protein, 205 aa, Corynebacterium glutamicum
MHVSTLPNKKLRTRIFAGTAAVALSLGVASCSNAEDAVDSATDAANSATSAAGSAINDATGTSSASTTEPSGTSGSDSGSDSAGGDTTEVESADGSTISIPTAVVTAANAAGFSTPESVEEGPNGESLVTFPEGYIVNSAEGGAQALVGMIGETWIGEGGLSAAVGLPTGPEEATTNGWTQQFTSGVISWLDDGSGQFAASVEPA

SEQ ID NO: 121 - DNA, 880 bp, Corynebacterium glutamicum
  CDS (101)..(850): RXA01174
atatcgcaaccgctgttaatgaagaggaagaggctcgcgatatcgcgaagctgtgccaggagatggtggaattagctcggaatattgagaagttgaggtaatgagcaacatgcagggaaacgattccaagaaatctagcggcgcgagtcgtgcggagagcccactgatcaagttccggacattgattatcgtcatctttgtcatcttgatcgttggtttggcatctattgcagtgggacctgtcgtgtaccagctcatcatgggacctggtgtgaaaaccgaaggaatccaggctgatggcgcagcacctgcgtccaccgacatgaacggcacctgggatgttgccccagggagtattccaaacaccacctcagctggattcaccttcgctgagatcctgccaggcgaagaaaagatcacctccggctcaaccactggtgtcactggcgaagtggtcatcgaggataactccctgatctctggtctgattaccgtcaacatgactcacatcaccaccgatcaggaaaagcgcgacatcaacgtgcgcactaagctcttccacaccgatcagtacccagaagcaacctttgaggttaccgattccgttgatctttctgcgctcccagacaccggatccattgctcaggttgtcatcccaggcgagttgaccatccacggtgaaaccaaggctgtggagcctacctttgatgtacttcgtactggtgaccaagttatcgtggcttccgatatcgaaatcaaccgcctcgacttcggtgtagaaaccccagagttcatcgccgcaaagatcaatgagaccggcgagatcaacgtccgaatcgtattggagaaataaaccatgatggcatcacggatgatccca

SEQ ID NO: 122 - protein, 250 aa, Corynebacterium glutamicum
MSNMQGNDSKKSSGASRAESPLIKFRTLIIVIFVILIVGLASIAVGPVVYQLIMGPGVKTEGIQADGAAPASTDMNGTWDVAPGSIPNTTSAGFTFAEILPGEEKITSGSTTGVTGEVVIEDNSLISGLITVNMTHITTDQEKRDINVRTKLFHTDQYPEATFEVTDSVDLSALPDTGSIAQVVIPGELTIHGETKAVEPTFDVLRTGDQVIVASDIEINRLDFGVETPEFIAAKINETGEINVRIVLEK

SEQ ID NO: 123 - DNA, 1675 bp, Corynebacterium glutamicum
  CDS (101)..(1645): RXA01184
atcttggttgggtgcgtccgaaggccatagcgaaggccaaaatcagaacgaggatcgggctgagtaaatgactaaaacacttctgaaactacagctgacgttgtggggaagaactattaaaggaaataaagcggcaatagtgatgatgtcgctgatatctttttacgccttgatgggtttgtttggtttcggcatctttttggctcttgggcttgggcaagaccacatgggcatccttgctggtgttgtctcggtcggcatggtggcttattgcattgctgcgtttatgtggccgtcaggtgaggggcagctggatccgactgcattttccaccatgccgctatcggcgaagcaattattgcctggattcgctatcggtacgctcctgcagtcacgggggattattgcggtgatttgtacggtggcgacatccattattgctgcggtgtttttacctgttggttcgtggccgatgatcgtgttcatgatggcggtatcgctggttactacgttgcttttgggtgagttgcttggggcgttgacctcgggttcttcttctagggtgagtaatgatcgccgtacagttcttacttccgttgtcttcatggtgtttgttgttggctataacatgctgattggcgcggatggaatgagtcgaatcgatgccattggggcttatacaaagtggacaccatttggggcgggtgcaggtgctattgaggcttttgctgttggtttgtggggtgaggcaggcctgttaacattgctggcttttgtttatgttgctgctggtttctggttatggtcacagctgattaatcgcgcgctcactgcgccgctggaccaaggtgggcaagggcaaagcgctaaagacagcgccggtgaaggcaagaaggttctctttctgccaggtattccttggtcagttggaggtgccattttctcgaggtcgctgcgttatatgttcagggactccaggttgttgggatcaatgattgtgttcccgcttcttggcgtgctgtttattttccagagcttcaccgttgagtttttcatgatctatgttgggttgatcatgatggcagtgttcgcaggatccgttgctaccaatgattttggctatgacggcccttcgttgtggctaaatatcgttgctggtgtcaaagcccgaacgttgttgatgcccaggcactgggcatcaatgctgccgggaagtgtgtcaattgtggtgtttatgatcatcaccattgtgctcgcggagaataagaccaccgctgtgctgatctgttttattggcctggggatctttatctccagtgcggctgtagcgttgttggtcaccacatttaatccgtatccgacttctaagccaggcacgagtccttggggcgatcgaagtggctattccggtgctgcgttcgtgggagcatttgccgcactgttactgggatggatcccgacgattcctactatcgcattgggtatctttggtctggttaccgatcagatgtggatgatcatcctcgcggaggtgctggccattattctcccagtagctgtgtacatcggcgttgctaaggtgtgtattcgcaaggtggagaaggatcttccggagatcttcgacaaggtgaaaactcacgtgaaatagaaaaatgcgggtgcttcgagaaaatct

SEQ ID NO: 124 - protein, 515 aa, Corynebacterium glutamicum
LWGRTIKGNKAAIVMMSLISFYALMGLFGFGIFLALGLGQDHMGILAGVVSVGMVAYCIAAFMWPSGEGQLDPTAFSTMPLSAKQLLPGFAIGTLLQSRGIIAVICTVATSIIAAVFLPVGSWPMIVFMMAVSLVTTLLLGELLGALTSGSSSRVSNDRRTVLTSVVFMVFVVGYNMLIGADGMSRIDAIGAYTKWTPFGAGAGAIEAFAVGLWGEAGLLTLLAFVYVAAGFWLWSQLINRALTAPLDQGGQGQSAKDSAGEGKKVLFLPGIPWSVGGAIFSRSLRYMFRDSRLLGSMIVFPLLGVLFIFQSFTVEFFMIYVGLIMMAVFAGSVATNDFGYDGPSLWLNIVAGVKARTLLMPRHWASMLPGSVSIVVFMIITIVLAENKTTAVLICFIGLGIFISSAAVALLVTTFNPYPTSKPGTSPWGDRSGYSGAAFVGAFAALLLGWIPTIPTIALGIFGLVTDQMWMIILAEVLAIILPVAVYIGVAKVCIRKVEKDLPEIFDKVKTHVK

SEQ ID NO: 125 - DNA, 820 bp, Corynebacterium glutamicum
  CDS (101)..(790): RXA01196
gggcggagcattcattgaatccacgtgatttcaaccgctttcgagccagcaaagacacccgcaaaaaccgctaagtagacgtcattgttatggtgggtgcatgcgtttagtcatcgcccgttgctcagttgattatgttggccgtttggaagctcatcttccgtccgccgatcgccttttgatggttaaggcggatggttctgtatccatccatgccgatgaccgtgcctataagccactgaactggatgacacctccatgttctttagttgaaactcccatcactgatgaagatggtgaagcaacaggggaaagcctgtgggtggtggaaaacaaaaagggcgagcagcttcgaattactgtggaagaaattcattcggaacaaaacttcgatctaggccaagacccaggtttggtgaaagacggagtggaagatcatctccaagagcttcttgcagagcacatcactacgttgggtgatgggtacacattgattcgtcgggagtatccaacagctattgggcctgtcgatattttgtgtcgcaactctgacggcgagactgtcgctgtggagatcaagcgtcgtggtggcatcgacggcgttgagcagttgaccaggtatttggaattgctcaaccgtgatgaattgctcaagcctgttcatggagtgtttgcagcccaggagattaagcctcaggcaaagactctcgcggaggatcgtggcatcaagtgcgtgacgttggattatcaagcgcttcgtggcattgagtccaatgagctgacattgttctaagaacatgggccgaaaaaatagaagaac

SEQ ID NO: 126 - protein, 230 aa, Corynebacterium glutamicum
MRLVIARCSVDYVGRLEAHLPSADRLLMVKADGSVSIHADDRAYKPLNWMTPPCSLVETPITDEDGEATGESLWVVENKKGEQLRITVEEIHSEQNFDLGQDPGLVKDGVEDHLQELLAEHITTLGDGYTLIRREYPTAIGPVDILCRNSDGETVAVEIKRRGGIDGVEQLTRYLELLNRDELLKPVHGVFAAQEIKPQAKTLAEDRGIKCVTLDYQALRGIESNELTLF

SEQ ID NO: 127 - DNA, 1300 bp, Corynebacterium glutamicum
  CDS (101)..(1270): RXA01263
gggaggtcgtgcggaaaaaggtgtaggtgtacttctaaaagttaaacctatgcgttggatcggagatctttcctattcgctttatctatagcattggccattgatcgttgtagggatttattatttcaatggagaaatgcacttttggcaaggtctcctaattatcgggttctctttcatccctgcttggctaagttatcatttcattgagaatccaatgcgtaattggtcagcaatcaaggctgacgcaagaaaagcagtggcctttggagttattttgatgacggtatcggcgactgctgggatcctcctctttttatctccaaatagaagccaagctgcgccaccccaatttagtttgaccccgtatgatccaaccgctgtaaataaggagtcggaaaaagaagcagcaaagaatctgtttggcgctgaggcgttgacagtggatccggatgccggtgaggttgttgatcgagtagataatttttatccgacgactgctaaggcaaaacgagattacccaagtaactatgcagcgggttgtcaccaagaagtcaatgagactagtcctgagtcatgtgtttatggtgataaaaattctgatttttctgtagcacttgtcggtgactcccacgctggtcattggcttcctgccttggaaccaattgctgaagcacaggggtggagattggaagtttatacaaagtcacagtgtccactcataagcactgcgatcaaacttggtgaaactttttatgcagaatgctatgagtggaatgaaaaattacttgctaagctaactggaccttctgcaccaaatcatgtgattgtaagtagccaacgttacgcttctgcaaatccgttaatcgatagtgtcgcgacgggaaccgtttccgaaggatatgaaatggcatggaattcattaaaagatgcaggtgtttctatttctgtacttcttgatactcctcggccgcaaattgatatcccagaatgtgtagcatcaaaccgcgataatctctcagaatgttcagttcaccggagcgttgcgcttgggactgaagctcatcctcagcaaaaaactgcagctcaaaatatagacgtgcctgtattggatttgagtaattggatttgtccggaagaatattgctccgctgttatcggaaatgttttggtatacagggattcacatcatttgaccgctacgtatgctcgtagtctctctagcgcattatggaatgagttggttgcctcaaatggtgagccttttaagtaagaggtagttgttcaagtagcgctttgt

SEQ ID NO: 128 - protein, 390 aa, Corynebacterium glutamicum
LIVVGIYYFNGEMHFWQGLLIIGFSFIPAWLSYHFIENPMRNWSAIKADARKAVAFGVILMTVSATAGILLFLSPNRSQAAPPQFSLTPYDPTAVNKESEKEAAKNLFGAEALTVDPDAGEVVDRVDNFYPTTAKAKRDYPSNYAAGCHQEVNETSPESCVYGDKNSDFSVALVGDSHAGHWLPALEPIAEAQGWRLEVYTKSQCPLISTAIKLGETFYAECYEWNEKLLAKLTGPSAPNHVIVSSQRYASANPLIDSVATGTVSEGYEMAWNSLKDAGVSISVLLDTPRPQIDIPECVASNRDNLSECSVHRSVALGTEAHPQQKTAAQNIDVPVLDLSNWICPEEYCSAVIGNVLVYRDSHHLTATYARSLSSALWNELVASNGEPFK

SEQ ID NO: 129 - DNA, 1246 bp, Corynebacterium glutamicum
  CDS (101)..(1216): RXA01268
gtagtaaccgatacgatttattgaagctatttagtaattgaggacaggtgtgtcaatgatactaagaaataggtcacgttgtagatcttctagagagaatgtgattctctttggggctacgacagacatgtcaaatattttttatgaagggatcctgcagaatctaattcaagatgggtgggatgtgcaccttgtttcaaatccaggcccagttgggaagaaattactgaatggtaaagctcatactatcgagatgtctagagagatttcaataggtaccgatgttaaatcattatttaattgggtgctattgcttaggaaaattcgtccaagagtgctgatagttggaactccgaaagcttcattgctgggagtcgtggcagcacgaattgctcgagtgccacgaattgtctatgtggcacatgggctgcgctctgaaactgttttaggcttaaaaaagaagattctagtgtttttggaatatttgacccagttgtttgcacatcaaactttggctgtaagtcattctctgaagaaagcaattgaagatgcgcaccctcgttttaaaggaagagtgcaagtcttaggttatggcagtatgaatggagttgagcttgatcgctttagagttccatcccttgaagagaaattatctgctcgtaatgctttaaacctgcctagtaaatctgtcattgttggttttgtcggcagaataaataaagataagggaggagatcttctcgctgctcttacaaaacatgaggcttttacccgattgcgactgcatctcttaattattggtgaattggaagacgatgacttgcgagaagcattcattaaattagttaatgaagggcaggttacgattacaggatggattgatttccctgaagaaccattagctgcagttgatgttttgcttcacccaactcagcgagaaggtttaggtatgtctttgctggaagctcaggctatgggagtgcctgtattgacgaatgctgtgactggaacagttgatgcagtaacaagtggagaaggtggcttttttgccgatgacgattctgttgagtcctgggtttctaagattgatttattagtttccgatcctaagttaagagaccggatgggacgtgctggtcgccagtttgtgtcagctcgtttcaatcgtgatgatgtcgcagctcgtttcagtcatttcgtggaacaattcaaaaaatagggctcattcaatttcaatattcagata

SEQ ID NO: 130 - protein, 372 aa, Corynebacterium glutamicum
VILFGATTDMSNIFYEGILQNLIQDGWDVHLVSNPGPVGKKLLNGKAHTIEMSREISIGTDVKSLFNWVLLLRKIRPRVLIVGTPKASLLGVVAARIARVPRIVYVAHGLRSETVLGLKKKILVFLEYLTQLFAHQTLAVSHSLKKAIEDAHPRFKGRVQVLGYGSMNGVELDRFRVPSLEEKLSARNALNLPSKSVIVGFVGRINKDKGGDLLAALTKHEAFTRLRLHLLIIGELEDDDLREAFIKLVNEGQVTITGWIDFPEEPLAAVDVLLHPTQREGLGMSLLEAQAMGVPVLTNAVTGTVDAVTSGEGGFFADDDSVESWVSKIDLLVSDPKLRDRMGRAGRQFVSARFNRDDVAARFSHFVEQFKK

SEQ ID NO: 131 - DNA, 1942 bp, Corynebacterium glutamicum
  CDS (101)..(1912): RXA01271
gtgaatccgatgccggacagatcgcagcaactcaatttggagattcagttttagcctgggttggcgaaacccaatttatttcaaaagatggtggacaaacatggcaataagcattggtaaagcaggacagaacttaaaagggtcagtgcctatcggaaaagtcctttttctcattgatgcccttgcctggatttctgcactatttatcggtgtggttttgcggtatgaattcaatctgagttctatcaactggagtgcgtttgcatggttcgggcttgctgcagttattttgcagtttgttctcggactttctctccatctttaccgcaagggattacgtcaccttttcggtagcttcgaagatacactaaacgtttctatctcggtcattgttgtcggtgttgtcctttggatcgcctcactatttgttggtcagcgttgggaaatctcacgcggtgtcatgctgctagttatcccgcttgctctcgtattcgtattggcagtgcgttatctcgcgcgtatgcgagttgagcgtcttcgtcgtccggctgcggattccacaccagcattgattcttggtggtggatacatcggtaccaacctgatccagtggatgatgtccgatcctaagtcgcctttccgcccagtcggcgttattgatgataaccctgaattagcatggcaacgcgtacgtggtgtgccggttcttggcaagtttgatgatatcgcccaagttgcatcagacactggcgcagaacttcttatcgttgctattggtgatgccgactctgcacttttaaggcgtgtccaagataccgctaataaaaatggtctttcagtaaaggtaatgccggctattgaccgcgtcgtttctaagggcgttcgtggaaacgatttgcgtgatctctctattgaagatttgcttggacgtcaacctgttgaaaccaatgtttcagaaattactggctatctaacaggtaagcgtgttcttgttaccggtgcaggtgggtcaattggttcccagctatgtacggaaattgccaaatacggacctgctgagcttatgatgcttgatcgcgatgagactggtttgcagcaggttctgattaacgttgctggtaacggtttgttggatacggatgctgtggttcttgcggatatccgcgaagcagacgcgatgaaagagatttttctcaagcgtaaaccagaagttgtcttccatgcagcagcattaaagcacttgccaatgctggagcagtatccagatgagggctggaaaacaaacgttctaggaactcttaacgttcttgctgccgcagaagctgttggtgttgagactttcgtcaatatttccaccgataaggcagctaatccaaccagcgtcttagggcactcaaagcgagtcgctgaaaagctgactgcctggtatggacagaattccaccagcaagtacctatcggttcgatttggaaacgtcattggtagccgtggatcgatgctcccgactttcaccaggctaatcatggaagataaaccgctaacagtgacgcacccggatgtcactaggttcttcatgacaattcctgaagcttgccaattggtcctgcaagccggtggtattggacgttccggcgaggttctcatccttgacatgggtgagcctgtaagcatccttgaaattgcacagcgcatgatcgcaatgtccggtaaagatattgacatcgtgttcaccggccttcgcgagggcgaaaagatgcacgaagagctggttggtgatggtgaaaccgaagatcgtccattccactcaaagatttcgcatgcacatgcagaaagcctcgctcctaataatctcgatagagatcgatttatgcaacgtgctggaaaactagcttcaacagattcggagatcatctaaatgactaatgaacgaatttttctatca

SEQ ID NO: 132 - protein, 604 aa, Corynebacterium glutamicum
MAISIGKAGQNLKGSVPIGKVLFLIDALAWISALFIGVVLRYEFNLSSINWSAFAWFGLAAVILQFVLGLSLHLYRKGLRHLFGSFEDTLNVSISVIVVGVVLWIASLFVGQRWEISRGVMLLVIPLALVFVLAVRYLARMRVERLRRPAADSTPALILGGGYIGTNLIQWMMSDPKSPFRPVGVIDDNPELAWQRVRGVPVLGKFDDIAQVASDTGAELLIVAIGDADSALLRRVQDTANKNGLSVKVMPAIDRVVSKGVRGNDLRDLSIEDLLGRQPVETNVSEITGYLTGKRVLVTGAGGSIGSQLCTEIAKYGPAELMMLDRDETGLQQVLINVAGNGLLDTDAVVLADIREADAMKEIFLKRKPEVVFHAAALKHLPMLEQYPDEGWKTNVLGTLNVLAAAEAVGVETFVNISTDKAANPTSVLGHSKRVAEKLTAWYGQNSTSKYLSVRFGNVIGSRGSMLPTFTRLIMEDKPLTVTHPDVTRFFMTIPEACQLVLQAGGIGRSGEVLILDMGEPVSILEIAQRMIAMSGKDIDIVFTGLREGEKMHEELVGDGETEDRPFHSKISHAHAESLAPNNLDRDRFMQRAGKLASTDSEII

SEQ ID NO: 133 - DNA, 1564 bp, Corynebacterium glutamicum
  CDS (101)..(1534): RXA01273
gacctattcagcgctggattttttctggcattttcttggcagtcagtgagttgctaacgttctattggttaaaaattgatctgcaagaggactgcaaaatatggaattaagggaatacgcgacaatcctgatgaagaattgggtgttgatcgttatcgcatccattcttggaattgcagcgggcgctggtttttcccttctagctacaccggagtatcagtcacgtactcagttgtatgtatcggtgcggtcgggggctgggacaacctctgacatggttcagggtgctaacttttcgcgtcagattgtgaatagttatgttgatgtcattaagacgggtgttgttctagagccggttgttgatgagcttggtctggagttgacggctaaccagttgagttctcatatcagtgcggcttctcctgctgatactgcgttgatcaacatcactgcttctagtccttctcctcagcaggcggctgagatcgccaatgcagtgggggagagtttcaagaatgtgattcagactgaattggaaccagactccggcgatggcatgagcccgattaacctgactactactcaggtggctctggaaccatcttctccggtcagtcctaatgtgatgatgaatatcctcctcggcctacttgtaggtcttgcaataggtgttggtattgcagtgcttcgcgcggctttggatactcgtattcattccttgcgcgatattgaagaggttactgataagccacttttgggcggaatcattgcggattctgaagttgagaagcacccgttgatcattaagcacaagccgcatagtcctattgcggagtcctttcgtgcgttacgtactaacctgcagttccttaacgtcggcggctcatcttcagtatttgttatctcctctgctaatcctggtgagggtaagtcaaccacttctgtaaacctagctttggcgcttgcagaggccggctcccgtgtagcgctgatcgaagctgatcttcgcttgccacgagtgagcaagtacctcggagttgagggcaacgcaggtctgactgacattctcattggcaaggccgaggttaatgatgtgttgcagcgttggggtaggactcagttgtactatctcccggcagggcgcattccgccgaacccgagtgagttgcttggttcagctgagatggacaaggtcattgcggagcttgaggaaagctttgattatgtgatcatcgatgcccctccggcgttggcggttaccgatgctgcagttattggtcatggcaaggctggcatcctgattgcggtctccgcaggttctacaaagaagcctgagttggaagctacgctgtccacgcttgagaatgcggatgccaatgttgttggcgttgtcgctacgatgctcccgcctaagtctgtggctggttatggctacggaaattacggctacggcgacacctccaaaatcaatgcccctaagcccgacaacaccgaactaaccaccaccgatgcttccaaggccaacaatgagcaatagcttcactattctcactgtctgtactgg

SEQ ID NO: 134 - protein, 478 aa, Corynebacterium glutamicum
MELREYATILMKNWVLIVIASILGIAAGAGFSLLATPEYQSRTQLYVSVRSGAGTTSDMVQGANFSRQIVNSYVDVIKTGVVLEPVVDELGLELTANQLSSHISAASPADTALINITASSPSPQQAAEIANAVGESFKNVIQTELEPDSGDGMSPINLTTTQVALEPSSPVSPNVMMNILLGLLVGLAIGVGIAVLRAALDTRIHSLRDIEEVTDKPLLGGIIADSEVEKHPLIIKHKPHSPIAESFRALRTNLQFLNVGGSSSVFVISSANPGEGKSTTSVNLALALAEAGSRVALIEADLRLPRVSKYLGVEGNAGLTDILIGKAEVNDVLQRWGRTQLYYLPAGRIPPNPSELLGSAEMDKVIAELEESFDYVIIDAPPALAVTDAAVIGHGKAGILIAVSAGSTKKPELEATLSTLENADANVVGVVATMLPPKSVAGYGYGNYGYGDTSKINAPKPDNTELTTTDASKANNEQ

SEQ ID NO: 135 - DNA, 781 bp, Corynebacterium glutamicum
  CDS (101)..(751): RXA01315
catgtgcggttgtgtcctaagtcattgatgtcacctaacgcccctaagttcactcggtgcaatattgcactgagtgcaagtttacactaggtttacttcagtggatattgaagagcagccctcgttaagagaaatcaagcgccaaatgaccctggaagcgatagaagataacgcaaccaggctcattctggagcgtggcttcgacaatgtcacaatcgaagacatctgcgcagaggcagggatatccaagcgcacattctttaactacgtggagtccaaagagtctgtggccatcgggcacacagccaagctcccaacggatgaagaacgtgaagcattcctggctacgcgtcatgaaaatattatcgatactgtatttgacctggtaatcaacctctttggcaaccacgacaactccaagtctggagttgcaggcgacattatgcgtcgacgcaaagagatccgggtgaagcatccagaactggcagtgcaacatttcgccaggttccaccaagcacgcgaagggctagaacacctaattgttgagtacttcgaaaaatggccaggctcccaacatctagatgagcctgcagatcgagaagcaatcgccatagttggcctgctgatctcggtcatgcttcaaggttctcgtgaatggcacgacatgccacaaggcacgcaagctgatttccaagcctgctgtcgcaaagcaattaaaaatacttttcttcttagaggtggattttcagaatgacatcacaggtcaagccggacgacgaac

SEQ ID NO: 136 - protein, 217 aa, Corynebacterium glutamicum
VDIEEQPSLREIKRQMTLEAIEDNATRLILERGFDNVTIEDICAEAGISKRTFFNYVESKESVAIGHTAKLPTDEEREAFLATRHENIIDTVFDLVINLFGNHDNSKSGVAGDIMRRRKEIRVKHPELAVQHFARFHQAREGLEHLIVEYFEKWPGSQHLDEPADREAIAIVGLLISVMLQGSREWHDMPQGTQADFQACCRKAIKNTFLLRGGFSE

SEQ ID NO: 137 - DNA, 1432 bp, Corynebacterium glutamicum
  CDS (101)..(1402): RXA01318
cggacgcgttccagagaaagtgcaggcataacccctaaaataccctgatcttcccccgtgtcctgcccccgtgtccacccctgcgtacataataggacgcatgggaaaacatgaggttgctcagcagacggttccgggtccttcgccggaaatggaagcgcagcggcgtaaagagttgcgcaagcacaaggccattgccactggcctgttgatttttgctgccgctgtatattttctttgccgtttcgtggagacccgtccgggtgaaactgcagcgtgggtaggttttgtgcgcgctgcggcagaggccggaatgattggcgggttggccgactggttcgcggtcaccgcgctgttccgtcatccattgtggctgcctattccgcacactgcgattatcccgcgcaagaaagaccagttaggtgaggccttaagcgggtttgtgggggataacttcctaaatgcccagctcattacggaaaaagtctctcaggcgcggatcccagagcgcgccggggagtggctcgcccagccggaaaacggggagaaagtttcgcgcgaagtcggcaaattgaccgctaatattgtgcgcgcaatcgatccgtcagatgctgaagcggtgattaaatctgcggtgatcgacaagcttgcggaacccacctggggcccaccagctgggcggttgctggaacaactcctcgccgaaggcaaagccgaaccagttgtccaggaactcgcgcagtggctgcacaaaaaggcgttgggctccgagccgctgattgatcgcctgctcaacgagcgccgcccgatttgggcgccgaaattcactgcgcagctggtcagcggcaaagtctatgacgaggtcataaaattcactgaagccgtcgctgccgatcctaaccacgaggcccgcaaatcgctgcgccgattccttaataaattggcgcaagacctgcagcatgacccaggcatgattattaaagttgaagaaatcaaacgcgacatcatgggctccggcgccatcgcgcaagccgcgccaaccatctgggcgtcagcctccgagtcgctcattgaatccgcagaagatgagtcatcaattctgcgtcgcaaaattgccgaagcagctaccagctggggtcaaagattgcttgtcgacgactccctccggcattcactcgacacccggattaccggcgccgctgctttcctcgccgacaattacgcccccgaagtcaccggcattatctccgaaaccattgaacgatgggacgctgaagaagcttcagagaaaatcgaactcatggtgggcaaagacctccaatacatccgccttaatggcacaattgtaggtgcattagcaggactggccatttacgctatttcccatatcctcttcggagcttaactaggagtaaccatcatgtccgatgca

SEQ ID NO: 138 - protein, 434 aa, Corynebacterium glutamicum
MGKHEVAQQTVPGPSPEMEAQRRKELRKHKAIATGLLIFAAAVYFLCRFVETRPGETAAWVGFVRAAAEAGMIGGLADWFAVTALFRHPLWLPIPHTAIIPRKKDQLGEALSGFVGDNFLNAQLITEKVSQARIPERAGEWLAQPENGEKVSREVGKLTANIVRAIDPSDAEAVIKSAVIDKLAEPTWGPPAGRLLEQLLAEGKAEPVVQELAQWLHKKALGSEPLIDRLLNERRPIWAPKFTAQLVSGKVYDEVIKFTEAVAADPNHEARKSLRRFLNKLAQDLQHDPGMIIKVEEIKRDIMGSGAIAQAAPTIWASASESLIESAEDESSILRRKIAEAATSWGQRLLVDDSLRHSLDTRITGAAAFLADNYAPEVTGIISETIERWDAEEASEKIELMVGKDLQYIRLNGTIVGALAGLAIYAISHILFGA

SEQ ID NO: 139 - DNA, 496 bp, Corynebacterium glutamicum
  CDS (101)..(466): RXA01326
gtccttgaggctgcttacactctacttattgtagaaatgggagggtcgtggcgtcgaaaagcaaacatcttttaacgcttttggcccgtattatggtggcatggctttccccgtgacagaagacaaaatcctggcagctgaggaaacccttggcaggcgcctccccgaaactttgcgcgaacgactacttcaaaacaatggtggcgaagtcatcgacaatgaaaacaacgactggattctccatccagttcgtgatgacagcgaccgaaaaaggcttgtccgaactgccaacgacatcatccgcgagaccgaatctgcacgtgaatgggacaatttccccgaaaatgcgatcgcaattgcaaatgacggaacgggcgacttaataattctgcttcccgacgatgatgctttctacatctggtcgcacgaagatgaacccctgatcgaaactgaacttgaggatgcctaaaacagctggacagaattcgacttggaa

SEQ ID NO: 140 - protein, 122 aa, Corynebacterium glutamicum
MAFPVTEDKILAAEETLGRRLPETLRERLLQNNGGEVIDNENNDWILHPVRDDSDRKRLVRTANDIIRETESAREWDNFPENAIAIANDGTGDLIILLPDDDAFYIWSHEDEPLIETELEDA

SEQ ID NO: 141 - DNA, 2527 bp, Corynebacterium glutamicum
  CDS (101)..(2497): RXA01331
ctaaactcgtctctcgtatctttcagtcatttatgtctgataagcaggcgcgtgcgccacacaattggcacaatcacaagaaagtgaagtgggaacctagatgctgacgacactatggattgcggtgttggtatttaccgttccaggattggtcgtctcgtgggtttctggccttaaagtgccctgggctatcgcagcctccatcccagccaccttcggtatttacggcctgtccgcctggttgctgggcttgtgggagatgcgttttgatctccattctgtagttatttccacattggttttcgctgcggttgctttggtatggcgcttgttttttgtcggtggttggcttgtacgtcggcgtaaagcacgtatccgcaggcagacgctcgcggatgaagagcgggcagaaaatgctgaggtatctgcaggggagcctgccgaatcgagcacaaacgaagcagccgaatctgaatctgaaacctcggagcgtcgcggaatctggcgcgtgatctttgattacatgcgcgacggtggcatcttggatcaccgttggctgctgcctgccgcaggtgctatcactggtgcgtggctgatcattgatcgtgccgttgatctgctcttgagcaccgagcatggtttgggcgatatcgtccaaggctgggatgtccattggcatgcttcgactgtccgttttatagatgagaccggcattgcgtcatccacgatgatggggcagctgcgcaatattgaaacgcagcaagatctgttctacccaagcgcatggcatgctggtgcatgggtgctgtcggatgtcggaaatctgacgattgttgaagccaccaacctcactggcattgtgctgtccggattgttgctgccgttagctgttgcactgattgcatggcggatgatcaacaatcgtggactgaccgcgcagattggtgcgggctttgctggactgatcaccattgcctctccggtactgttctgggttggtaactacgtgggtgcgtggccttatgttgctgcgatcggtgcttcaggtgtggtgcttgcgctgtttatgtccactccgtctgtgccggtaagaatctttgccgcagcattggcgttcatgggtatgttccagctgcatccagccccatccaccatcgtgatcatggtgttgctgctgtggtggctgctcaaactcgtggtggttccaagccagaaagtgaagggctggaaggcgggcatcggtatccgtttgaaggatgtcggcatcctggccatcacgggcatcatcggtgtgctcttcatgctgcctcaggtgatttcaggttccgaacaaaccgaagatgtgctgtcatattctgctgaggaacaagtcacccgcagcgagtcctggttggtgtctattttcatggagacccgccatgttgatttcttcggaaatattgacatcgtcccagtgctggtattcgcagcaatcggtggcgtggttgctttggtgtggcgcggaaacttgtgggcgccggtgttttacttcgccagcgttgcgttgaccgctaactcgctgaagccttttgaagagccgtggggtgattggctcaacatcgtgggcggtctgcattactccacaggacaccgtttgatcatgcctgtcgccatgttcacttttgctgccgcaggtatcggcgctgccgcagtgatccgtttgatctgcttgggaccaataaagaagttcaccactgtttccggtgttgtttctgtggtgatggctcttgttgtggctgtgccattgcagacttgggcgaaggattttgtagaggaaggatccgaaaccacaatccttgcgccacacaatgatgaacgtatggtgagcaacaacgacttggctgcctgggactggttaatccaacagccaggtggagctgacatgaacatcatgggtgaccccgcagatggtaacggctggatgtatgcctacaacggcttgcactccgtggcccgccactatgcatggccagcagcaggcgaaggctctgccaccgcgatgctgttctggtggcctcaacttctaggtgtgggcaccgatgaaaacccagatcaagtcaacgatgtggatcaggctgctcgtgatctcaacgtcggctacttcatgatcagtccgtggacgttctgggatttccagatccccaacttccgccagatcgatctgctgtggcaaaccccaggcgtgacaccggtgtacaagaagggcgactcggtgatcttcgcagtcaacgatatgttcactgacgccgaactggatcagatgcgtgcacctggtaattctccagaaccactgccagagcttcctaccttgggcgagcttgggttggctgaaactgaagacgaggtagatcagacttattaccatcgtccaacggttcctgctggtgtgaactcagagatgccttcagccgaaactctgtatgcaccggatccaacgaagccgcatacggtccctaactaatcacaaagagtattcagtaaatcgacc

SEQ ID NO: 142 - protein, 799 aa, Corynebacterium glutamicum
MLTTLWIAVLVFTVPGLVVSWVSGLKVPWAIAASIPATFGIYGLSAWLLGLWEMRFDLHSVVISTLVFAAVALVWRLFFVGGWLVRRRKARIRRQTLADEERAENAEVSAGEPAESSTNEAAESESETSERRGIWRVIFDYMRDGGILDHRWLLPAAGAITGAWLIIDRAVDLLLSTEHGLGDIVQGWDVHWHASTVRFIDETGIASSTMMGQLRNIETQQDLFYPSAWHAGAWVLSDVGNLTIVEATNLTGIVLSGLLLPLAVALIAWRMINNRGLTAQIGAGFAGLITIASPVLFWVGNYVGAWPYVAAIGASGVVLALFMSTPSVPVRIFAAALAFMGMFQLHPAPSTIVIMVLLLWWLLKLVVVPSQKVKGWKAGIGIRLKDVGILAITGIIGVLFMLPQVISGSEQTEDVLSYSAEEQVTRSESWLVSIFMETRHVDFFGNIDIVPVLVFAAIGGVVALVWRGNLWAPVFYFASVALTANSLKPFEEPWGDWLNIVGGLHYSTGHRLIMPVAMFTFAAAGIGAAAVIRLICLGPIKKFTTVSGVVSVVMALVVAVPLQTWAKDFVEEGSETTILAPHNDERMVSNNDLAAWDWLIQQPGGADMNIMGDPADGNGWMYAYNGLHSVARHYAWPAAGEGSATAMLFWWPQLLGVGTDENPDQVNDVDQAARDLNVGYFMISPWTFWDFQIPNFRQIDLLWQTPGVTPVYKKGDSVIFAVNDMFTDAELDQMRAPGNSPEPLPELPTLGELGLAETEDEVDQTYYHRPTVPAGVNSEMPSAETLYAPDPTKPHTVPN

SEQ ID NO: 143 - DNA, 1777 bp, Corynebacterium glutamicum
  CDS (101)..(1747): RXA01400
cgccggggacggggaaggcgctgtgttgtaggggagagttcatggaaacttcctaaattattttctatcaatctatagatactaggtctattatagtgccatgagactgacacatgtagaccaattaaaccttccgtttggcacgttgagcagctatcacccttatgcatcggctccgggtgaggcggtgccggtgtcctttgatcagcaacgacatgtgggtgccggcgagcgaccgggtagttggatggcgattagtgtttctatgcctaaggcgatcagccgtgaggaattggagcgcgcgtggcttgaagtgattgaacggcacggcaccttgcgcacagtatttagcacgggaatgggtggggaagtgcagcaacaccgcattgatgtgggcccgggaaaatggattgaccacgccgttgcgcctggtgagagcattaatgaggcgttgcgggcggtgttgaatcggcagtgttcgccgtactcgaggccatcgcatagtttgtgcattattgatgcgcatccgcgtcccacggtgattattggtagtgatcattcgcatgtggatatgtggtccatgctggtgattgtgcgcgatttgttggctgcgctcgatatggaacttcccgttgagccgccgttggcgtttgaatcgcacaccgcggaactcctcgcggctccacctgcaccggagcggattcaccagcggtggcgtgaaattttggaagctggtggtggaaaaatgcctcagttcccgcttccgcttggcgatgccatctccatgcctgaacgcgttgaagtccgcgacattttcggggtcaatggcttggcgatttactcggcacgcgcccgcgcacaacaggtaagctccctggccttgactatttcagtgatggctgatgttacggcggcgctggcggaccttccgttgcgtgctgtattcccagtccatagccgtttcgatcagcgctggcacgatagtgtcgggtggtttatctccaattcggtcattgaggtgccagattccgatcctcacactgcagcccaagctgttcgcgaggctgtttctttgggaagctacccgctggctgagctgcttgaaccgtggggtggcatgccggaaacgccaggaatgtttgctatttcttggcttgacctgcgccgactcccagtgagcattgacgatattggcctccaagcccagtatgtcagcgcttcactgcgcaccgatggtgtgatgctgtggtttattttggatcgctccggcgcgcaccttcgctgtcgttatcctgactctttggtggcgcgggaaaatgtaggccgctggattgatgcgattgttgctcagatgcgcgccgaagctgggacggtgaatctgcaggccggcggggaacagctgacacttcggcatggaactcgcgccgatatttccgagatcgccccgctacttgcccgaaacgcagctgacccttgtgagctggtggatcttgaacatgcccttgacctgctgacacacgagtcttcgcatttcctggcggtggttcgaaacgctcgtggcaagataatcgcagcgatgcagttgactattgttccggagttttcccgcggtggtgcgcttcatcttcacatcgaggggccgttcattattccggaatatcgcaccaccgatttggataaaaagctgcgcgcctgggctgtggagcatgggcgtgcgcgaggggtgaaggttgaggaggtggtgggatagttggtttattggcgcctcgttgtggaa

SEQ ID NO: 144 - protein, 549 aa, Corynebacterium glutamicum
MRLTHVDQLNLPFGTLSSYHPYASAPGEAVPVSFDQQRHVGAGERPGSWMAISVSMPKAISREELERAWLEVIERHGTLRTVFSTGMGGEVQQHRIDVGPGKWIDHAVAPGESINEALRAVLNRQCSPYSRPSHSLCIIDAHPRPTVIIGSDHSHVDMWSMLVIVRDLLAALDMELPVEPPLAFESHTAELLAAPPAPERIHQRWREILEAGGGKMPQFPLPLGDAISMPERVEVRDIFGVNGLAIYSARARAQQVSSLALTISVMADVTAALADLPLRAVFPVHSRFDQRWHDSVGWFISNSVIEVPDSDPHTAAQAVREAVSLGSYPLAELLEPWGGMPETPGMFAISWLDLRRLPVSIDDIGLQAQYVSASLRTDGVMLWFILDRSGAHLRCRYPDSLVARENVGRWIDAIVAQMRAEAGTVNLQAGGEQLTLRHGTRADISEIAPLLARNAADPCELVDLEHALDLLTHESSHFLAVVRNARGKIIAAMQLTIVPEFSRGGALHLHIEGPFIIPEYRTTDLDKKLRAWAVEHGRARGVKVEEVVG

SEQ ID NO: 145 - DNA, 1081 bp, Corynebacterium glutamicum
  CDS (101)..(1051): RXA01425
ccggtgccgaaccatggattttggtccaccgaaacggtgacatagaagtcctgccaacaagtacatagtccctattaatcccaaggagtttcgactcacagtgctcaatttcatttattggccaatttcggccattctgtggttctggcataaagcgttcagctttgtgctgagcccagattccggaattacctgggccttgtcgatcatgttcttgaccttcaccgtgcgtatggttctggtcaagccgatggtcaacaccatgcgttcacagcgcaagatgcaagacatggctccaaagatgcaggccatccgcgagaagtacaaaaatgaccagcagaagatgatggaggagacccgcaaacttcaaaaagaagtgggcgttaaccccatcgcaggctgtttgccaatgttggtgcagatcccagtgttcctgggtctgttccacgtgctgcgctccttcaaccgcaccggttctggcgttggccagctggaaatgaccgttgagcaaaacgcgaacaccccgaactacatcttcggtgtcgacgaggttcagtccttcctgcgtgcagacctgttcggtgcgccactgtcgtcctacatcaccatgcctgctgacgcgttcgacgcgttccttggcctggatgtctcccgcctcaacatcgcgctggttgcagctccaatgattttgatcattgtcgtggcaactcacatgaacgcgcgtctgtccgtcaaccgccaggaagctcgcaaggcagccggcaagcagcaggccgcttccagcgatcagatggccatgcagatgcaaatgatgaacaagatgatgctctggttcatgccagccaccattttgttcaccggcttcatctggaccatcggtcttcttgtctacatgatgtccaacaacgtgtggaccttcttccagcagcgctacatcttcgccaagatggacgctgaggaagcagctgaggaggaggaaaagcgcgcagcaaagcgcactaccgctccaaagcctggcgtgaagccagaaaaccccaagaagcgtaagaagtaaaacttcactaaaaaccgccagcccacg

SEQ ID NO: 146 - protein, 317 aa, Corynebacterium glutamicum
VLNFIYWPISAILWFWHKAFSFVLSPDSGITWALSIMFLTFTVRMVLVKPMVNTMRSQRKMQDMAPKMQAIREKYKNDQQKMMEETRKLQKEVGVNPIAGCLPMLVQIPVFLGLFHVLRSFNRTGSGVGQLEMTVEQNANTPNYIFGVDEVQSFLRADLFGAPLSSYITMPADAFDAFLGLDVSRLNIALVAAPMILIIVVATHMNARLSVNRQEARKAAGKQQAASSDQMAMQMQMMNKMMLWFMPATILFTGFIWTIGLLVYMMSNNVWTFFQQRYIFAKMDAEEAAEEEEKRAAKRTTAPKPGVKPENPKKRKK

SEQ ID NO: 147 - DNA, 3457 bp, Corynebacterium glutamicum
  CDS (101)..(3427): RXA01434
acgggatcgcccaaaccgccaccaacccactaacgtatcgcatagttattttcgccgtgctcgccgttaaggcgcgcactcgtacatgaatggtcaacaagtgagttcttcgctttcgaataattcggagcagtccggcctgcgtggcaggatcgttgctccagcaccgccggcgcctgtgcccgaggcgcgcaagaaggctgtcgcacgcacggatggtgatcgctcgagtttgaaaaactcgcctacggcatccgccacccaggcagcccagacgcgcccggcagaaccggaaccaaaaaagcacacctccgattctgatgtggtgcgctcgactggctccatggcaatagccacgctgctgagtcgtatcaccggtttcctgcgcaccgtgatgattggtgcggcgctgtcgccggccatcgcttcggcgttcaacactgccaacacgctgcccaacctgatcactgaaatcgtgttgggtgcggtgctgacatcgctggttattccggtccttacccgcgcggaaaaagaagacgccgacggcggttccgggttcttcaggcggctgctcaccctgtcggtgacgctgctgggtggtgtcaccatcctgtcgattatcggcgcgccgctgctgacacggatgatgctgtcctctgagggacaagtcaacgtggtcatgtccacggcctttgcgtattggctgctgccacagattttcttctacggcctgtttgccctgttcatggctgtgttgaacacccgtgaagtgttcaaacccggcgcgtgggcacctgttgtcaacaatgtgatcaccttgaccgtgctgggcgtgtacatggtgctgcctgcgcgtttgcacccgcatgagcaggtgggcatttttgatccgcagatcattttcctcggcgtgggcaccacccttggtgtggttgcacagtgtctaatcatgattccgtacctgcgtcgcgcgggcattgatatgcgccctctgtggggtatcgatgcgcgtttgaagcaattcggtggcatggcgatggcgatcatcgtgtacgtggcaatctcccagttcggttacatcatcaccactcgcattgcgtcgattgcagacgatgctgcgccgtttatttatcagcagcactggatgttgctgcaagttccttatggcatcatcggcgtcaccttgctcaccgcgattatgccgcgactgtcccgcaacgcggcagacggcgatgatagggcagtagtctctgaccttcagttgggttccaagctaaccttcatcgcactgatccccatcgtggtgttcttcaccgccttcggtgtccctattgccaatggcctttttgcctacggccaattcgatgccaacgccgccaacatccttggttggactctgagcttctctgctttcacgctgattccttacgctttggtgctgctacatctgcgtgtgttttatgcgcgtgaagaggtctggaccccaaccttcatcatcgccggcatcaccgccaccaaggtcgtgctttccctgttggcaccgctgctgtcgagctccccggagcgtgtggtggtgcttcttggtgcggccaacggtttcagtttcatcaccggcgcggtcatcggcgcgtatctgttgcgcaacaaactcggcctgttgggtatgcgctctttggctaaaacctccctgtgggcgttgggctctgcggcggttggtgcagcagcagcatgggcgttggggtggctgattcaagccgtcgtgggcgatttcttgctgggcactctaagctccgtaggctacttgttgaacctggctgtgttgggtgtcttcttcatcttcgtcaccggcatcgtgttgtcacgttctggtttgccggaggtccaaaacttgggccaggcactgacccgcatcccaggtttgagccggtttattcgcccgaataccaagatctctttggatgtcggcgaagtctccgagcaggatttctccacccagctggtcgcgccaagcgagttcgcagcaacccctgtgccgccaccgatgtccgccggtattgtccgcggacctcgcctggttcccggcgccccagtcggcgacggtcgtttccgtctgctcgccgatcacggcggcgtccaaggcgcgcgtttctggcaggcccgcgagatcgccaccggcaaggaagtcgcgctgatctttgtggatacttccggcaacgccccatttgcgccactgtcttcggcagccgcagcgggcatcgcctacgaggtgcagcgccgcaccaagaagctggccagcttgggcagcttggcggtagcccccaacatccactccgaggcgtaccgcaacggttgcctcattgtggccgattgggtgcctggctccagcttgagcgccgtcgcggaatccggtgccgatccccgcgccgccgcgttcgcgctcgcggaactaactgaaaccatcggcgaggcccacgagatgggtatcccggccggcttggacaacaagtgccgcatccgcatcaacaccgacggccatgccgtcctcgccttcccggcgattttgcccgatgcctcagagctccgcgacgccaagtccctggcctcggccgccgagatgcttatcgacgcgaccctcgctcccagcgacgtcaaggcaatggtcactgaagcccaggggctagctacagaagacaatcccgattacgcatcacttgccatggcgatgcgcacctgcggactgttcaccgaggaaccaacccaccttgtggtgaagaaggaaaagacaccaaagcctgcgacacgtgatggtttcggtgcctccgactacaccgtcaagggcatggcagccatcgccgctgtggtgatcatcttggtttccctggtggccgccggtaccgcgttcctcaccagcttcttcggcagcagcaccaacgaacaatccccgttggcctctgttgaagccaccacctctgcaacaccagaacctgtggggccaccggtctacctggatctggatcaagcccgcacgtgggatgacggtgcaggaacagatgtcaccgacgtcaccgacggcaacacctccaccgcatggacctccaccggcggcgacggcctcctagttgacctgtccacgcctgcccgcctcgaccgcgtcatcttgaccaccggcaccggctccgacagcaacgtgacctcgaccgtgaagatctacgcattcaacgacgcctcaccacactccctgtcggaaggcatcgagatcggcaccgtggattattccggccgcagtctcagccacagcatccgcgattcctccaagcttccgggtcaggtggaatccgtggtgattctggtcgatgaggttcgttcctcacaaacctcagacaccaatccacagatgcagatcgctgaagtacaacttgttggttggtaaattacgcgtttgtgattgacccccatt

SEQ ID NO: 148 - protein, 1109 aa, Corynebacterium glutamicum
VSSSLSNNSEQSGLRGRIVAPAPPAPVPEARKKAVARTDGDRSSLKNSPTASATQAAQTRPAEPEPKKHTSDSDVVRSTGSMAIATLLSRITGFLRTVMIGAALSPAIASAFNTANTLPNLITEIVLGAVLTSLVIPVLTRAEKEDADGGSGFFRRLLTLSVTLLGGVTILSIIGAPLLTRMMLSSEGQVNVVMSTAFAYWLLPQIFFYGLFALFMAVLNTREVFKPGAWAPVVNNVITLTVLGVYMVLPARLHPHEQVGIFDPQIIFLGVGTTLGVVAQCLIMIPYLRRAGIDMRPLWGIDARLKQFGGMAMAIIVYVAISQFGYIITTRIASIADDAAPFIYQQHWMLLQVPYGIIGVTLLTAIMPRLSRNAADGDDRAVVSDLQLGSKLTFIALIPIVVFFTAFGVPIANGLFAYGQFDANAANILGWTLSFSAFTLIPYALVLLHLRVFYAREEVWTPTFIIAGITATKVVLSLLAPLLSSSPERVVVLLGAANGFSFITGAVIGAYLLRNKLGLLGMRSLAKTSLWALGSAAVGAAAAWALGWLIQAVVGDFLLGTLSSVGYLLNLAVLGVFFIFVTGIVLSRSGLPEVQNLGQALTRIPGLSRFIRPNTKISLDVGEVSEQDFSTQLVAPSEFAATPVPPPMSAGIVRGPRLVPGAPVGDGRFRLLADHGGVQGARFWQAREIATGKEVALIFVDTSGNAPFAPLSSAAAAGIAYEVQRRTKKLASLGSLAVAPNIHSEAYRNGCLIVADWVPGSSLSAVAESGADPRAAAFALAELTETIGEAHEMGIPAGLDNKCRIRINTDGHAVLAFPAILPDASELRDAKSLASAAEMLIDATLAPSDVKAMVTEAQGLATEDNPDYASLAMAMRTCGLFTEEPTHLVVKKEKTPKPATRDGFGASDYTVKGMAAIAAVVIILVSLVAAGTAFLTSFFGSSTNEQSPLASVEATTSATPEPVGPPVYLDLDQARTWDDGAGTDVTDVTDGNTSTAWTSTGGDGLLVDLSTPARLDRVILTTGTGSDSNVTSTVKIYAFNDASPHSLSEGIEIGTVDYSGRSLSHSIRDSSKLPGQVESVVILVDEVRSSQTSDTNPQMQIAEVQLVGW

SEQ ID NO: 149 - DNA, 676 bp, Corynebacterium glutamicum
  CDS (101)..(646): RXA01439
gttaatccacagcgccctgtgtgcactctattagtgaatatccggtgaatgctcgtccctcgactgtctacttagtaggtttgcaggctagtcttttgtcatgacccgatactttgcagtttccaatcttcaggagcttggctccctcgaagtacacaaattgtacaaacttcgtgtagatattttcgtccacgagcagcagactccgtacgcggagatcgatgacaccgatgctgccccaaccaccaatcacatcctggtttgggagcgcgccgacgccaccccaaccaacctcatcggctgcgcacgcctcgcgcccatcaccgccgccgagcttaaggcgtacaccggcaagggcatttcgcttgacgacgccaccccgctctcacaactcggccgcgtagcggtggcacaggaagggcggggctcggggctctcaggtgagctcatgcgcaacgcgctgcgtcttgcatatgagcagtaccccgaccgcgatgttgtcctgaccgcgcagaagcctttggtagatttctacgcagaatacggctttgaggtcttgggtgaggaataccttgactcgggtgttcctcaccttccgatgttgctcaaggctgatgagcttgaaaggttctcagacctagacgcctaatccgtagtcactggaactcacccacat

SEQ ID NO: 150 - protein, 182 aa, Corynebacterium glutamicum
MTRYFAVSNLQELGSLEVHKLYKLRVDIFVHEQQTPYAEIDDTDAAPTTNHILVWERADATPTNLIGCARLAPITAAELKAYTGKGISLDDATPLSQLGRVAVAQEGRGSGLSGELMRNALRLAYEQYPDRDVVLTAQKPLVDFYAEYGFEVLGEEYLDSGVPHLPMLLKADELERFSDLDA

SEQ ID NO: 151 - DNA, 1159 bp, Corynebacterium glutamicum
  CDS (101)..(1129): RXA01441
ttataacaattagccgtgagggtattaatcaaggtttcgggagactaacgttttagaaacaagtggactccagcacacctcgtgagatggcaggttcatcatggctagaacgacaacagcgcacgcagttctcatggcgcttagttcagtcgggcttttgatgctccaggcctgctccgaacaggaacaaaccccagaacaaacgccagcgcccaccctgacttcgcaggctcccgagactcctcaagcctcaacaacctcctcagcaagctccacagcaactcccatagcaactcccatagcagccaccgagttggattatctccacatcgatccagcaacgtatgacatcggtgtccaagaccaagaaactgccgtatttaccactggcgatgggatcacagcgcagtgtttcttcgaggcaacaccgggggagaccagctatcagatcaaggagtttgatttcgacgaaactgcgggaacgtgcgcttttggtgatcaacacatcagcgtcaccacggatgaaaatgtccgggaacgctttgccgaattgagtgaaaccgaagaagaattaccagaagcgcaagcgactctcgatgttggtgagatggtgcatcttggtcacatgggttgttgggcgccgagtgtatcggagtttagttgtctcgatttcgcctccaaccaggcgttcaccatgaatgaacagggcttccatgagcttgatcctgcaaaagccactgagcagctaattaattcgagtggccaggttcaaacgttatcgaaaatgacgaatttccagttcaccgatggcaccagcatcacctgtgtcagtgagttgcaggcggaagagttcttgtgccacaacagtggtcctggaggctggtcaacttcagctggccctgccaacaccctgtggtggaatctgaaccaggccgactccgagtttgagggtgctcgccccacgaatccaacgcaaagcgtttataaatctcaacaaatattcggtccgggatcgtatctcctcgcgaacggtgtgagtgcagaatttgatggaaccaccctcacgctgaccacgcctcaggggaatcagtattgggcaaacacacacgattttggagccggcacacactaattttaggagcactgatgaaaaccaagt

SEQ ID NO: 152 - protein, 343 aa, Corynebacterium glutamicum
MARTTTAHAVLMALSSVGLLMLQACSEQEQTPEQTPAPTLTSQAPETPQASTTSSASSTATPIATPIAATELDYLHIDPATYDIGVQDQETAVFTTGDGITAQCFFEATPGETSYQIKEFDFDETAGTCAFGDQHISVTTDENVRERFAELSETEEELPEAQATLDVGEMVHLGHMGCWAPSVSEFSCLDFASNQAFTMNEQGFHELDPAKATEQLINSSGQVQTLSKMTNFQFTDGTSITCVSELQAEEFLCHNSGPGGWSTSAGPANTLWWNLNQADSEFEGARPTNPTQSVYKSQQIFGPGSYLLANGVSAEFDGTTLTLTTPQGNQYWANTHDFGAGTH

SEQ ID NO: 153 - DNA, 1297 bp, Corynebacterium glutamicum
  CDS (101)..(1267): RXA01448
gtaatctcagcagttaaaaagggcagttccgcatcagggggactgccctttttcgtgtcttctcatgctcttgtgaatatgcatagctaatcttgaggccatggcaaagaagaaactggggactgtcgccagactgtctgaactggataagtccctgcgcaatagattgctgcgggttcgttcccgactgctgtttattgttcattccgcaattggtgcgggtgtggcgtattggatcgccgtggaagtgatcaaacacggacaaccgtttttcgcaccgatgtccgcggtgattattttgggtctctccggaggagaccgcatcaaaagagccacggaactcaccctgggctgtgctttaggcgttggtttgggtgatttactgatcatgcaaatcggcacgggctattggcagatatttgtggtagttggattagcgctgctggtggcctcgtttgtttcaccggcaccgttggtgagtaatcagatggccattggtggcattttgattgccacgatgttcccgccaggtgatggtggaagcattgaccgtatgatcgacgccttcattggtggtggcgtgggaattttggtcatcgcacttcttccctcatctcctcttgacgcaggccggcatcaagtggccaacgttttggggatcgcagctagtgtgctggaagacgtggcagcttccctaaaagccaaggatgcagccaaactcaacaatgctttggaagcattgagaaggtcgcaggcgtcggtgaacaagctggaaactgcggcatcttcaggcaaggaagcaaccaccgtatcgccatttttatggggagatagggcccgcgtgagatcgctgtatcgcattctggcgccagtggacaacgtcatccgaaatgctcgagtccttgcgcgacgggcagtggtgctgaccgaagacaatgacaccgtcagtgatgaacaaatccacgtgattgaggaaatcgcagacattgcactgcgactgtcagacctttatgagcaccacaaagaaatcagtgaagcactggaaattcctgagttggttaaccgactgcgtcaactgggcagtgaagtgggcgaggacatcgccgaagatcgagtgctatccgcacaagtaattttggcgcaatcgcgatccatcattgtggacctgttgcagatctgcggcatgtccagggaatctgcggtggcagtgttggttccgacctcagagagtccggcttaccctccggagctgtgggatgacgaagactagccttttatcgcggttcggttttcacgg

SEQ ID NO: 154 - protein, 389 aa, Corynebacterium glutamicum
MAKKKLGTVARLSELDKSLRNRLLRVRSRLLFIVHSAIGAGVAYWIAVEVIKHGQPFFAPMSAVIILGLSGGDRIKRATELTLGCALGVGLGDLLIMQIGTGYWQIFVVVGLALLVASFVSPAPLVSNQMAIGGILIATMFPPGDGGSIDRMIDAFIGGGVGILVIALLPSSPLDAGRHQVANVLGIAASVLEDVAASLKAKDAAKLNNALEALRRSQASVNKLETAASSGKEATTVSPFLWGDRARVRSLYRILAPVDNVIRNARVLARRAVVLTEDNDTVSDEQIHVIEEIADIALRLSDLYEHHKEISEALEIPELVNRLRQLGSEVGEDIAEDRVLSAQVILAQSRSIIVDLLQICGMSRESAVAVLVPTSESPAYPPELWDDED

SEQ ID NO: 155 - DNA, 604 bp, Corynebacterium glutamicum
  CDS (101)..(574): RXA01518
agcagaacctgatgccgtcctgcacggcacgaccattgcagaacatgtggataatcttgatcccacagacattgaaggtgtcaccaagatttaaggagtcgtggctttcatgcagaaaacgtcagcgggttggttgatcgcaacgggaggtttcctcgccgctgtgtccgccattttgacgtggcgtttttatggatccatgacctctatttccatcacggtatccatcactttttggttgttggccgtggtgtgtggtttcgcaggtgtgaaggtccaaggtcgcctcgatgaggggctgatcggccaggacaaatcccaaatgaaccccgtgaccattgcctatctggccatgctgggtcgagcgtgtgcgtggggtggcgcaattttcggcggcgtttatgtgggaattggcagttatgtaatcccacgcgccggtgagttgtccgcagcatcgaatgatcttccgggagttattgcctgtgcgctgggcggaatcgcactctcagctgccggactttatttagagcgaagctgtgaggctccgcctccccaatctggcgaagcgatcagctagattggaattcatgaatcaagacctgtc

SEQ ID NO: 156 - protein, 158 aa, Corynebacterium glutamicum
VAFMQKTSAGWLIATGGFLAAVSAILTWRFYGSMTSISITVSITFWLLAVVCGFAGVKVQGRLDEGLIGQDKSQMNPVTIAYLAMLGRACAWGGAIFGGVYVGIGSYVIPRAGELSAASNDLPGVIACALGGIALSAAGLYLERSCEAPPPQSGEAIS

SEQ ID NO: 157 - DNA, 1372 bp, Corynebacterium glutamicum
  CDS (101)..(1342): RXA01536
agcatagatgacttgacactgttgcagcaggcggttttcacctggcctcttaggatttggtcaaatggttgcaacgacgccagggaaggaggcgcaccccatggcatttggattttttagtagacgtaagaaaaagaacaaagacaaaaacccgaatgaaaattcagcagtgcccgcacactctgaagattcacctcaggaggtttttgagggtaatggtcgtcaggtaggcgaccccattgaacagcaggttgatcgagatgctaaaggtcgtctcacagcggcggatttcttgccggacgctgatctgccacagctgaatcgttcgcgtgcaaatatgctgcgccgtgaattggagtaccgtttttcactccagaatgcccacattaatatcgatggaaacacggccatgattcagcgttcagatggcggggcagcacatgtctcgttgcgcaccctcgcgatgaatgcagctggccttgataactttgatcaactccctgaactggtggaaagcttcgttcacggcacgctggccgatgcaacattaaacgatctttctactgctgacctgtataaagcactgcgccttcgcctgctgccaacacctggcgaaggcgacgatctagttgagcatggactcgaccgggaaagccagatccgcgacgattcaatcctgcgcaccttcacctctgacatgtcgatcgcgctggtgctcgataccgagcatgccatccgcatccagccactcaaagagctcgaggagttcgatgacctcagcgccctagagcgggctgcggaccgcaatacctggcaagagctttacgacgcaaacgttgacgcttccttcgtcgacgctgaatcagacagcgaagggtcatcattttgggctttcgaatctaactcgtactacttgggtagtgcaccactgttcctcaacgatctgttggcaaagtgggcacctgacctggaccaaagtgatggcgtcatctttgctgtccctgatcgtgatctgttgattgcgcgtcctgtgaccaccggcgaagatctgatgaacggaatcaccgcgatggtgaggatcgcgatgcgctttggcctcgggaacccgacgtcgataagcccgcgcctgcacctgctgcgcgacaaccaggtgaccaccttcaccgacttccgcgtcgtctctcctgaaatggaagctgaatgggaagacagcgcgtttgacgcgccaccggccggcgcgatcggcattgaggtgcgcccagatccgtatctgatggagcgcctccaacagggcggctttggtgatttcggagatttcggcaagccccgcgatctagatatgtagcgaaaaagggaccttcacttcttaaga

SEQ ID NO: 158 - protein, 414 aa, Corynebacterium glutamicum
MAFGFFSRRKKKNKDKNPNENSAVPAHSEDSPQEVFEGNGRQVGDPIEQQVDRDAKGRLTAADFLPDADLPQLNRSRANMLRRELEYRFSLQNAHINIDGNTAMIQRSDGGAAHVSLRTLAMNAAGLDNFDQLPELVESFVHGTLADATLNDLSTADLYKALRLRLLPTPGEGDDLVEHGLDRESQIRDDSILRTFTSDMSIALVLDTEHAIRIQPLKELEEFDDLSALERAADRNTWQELYDANVDASFVDAESDSEGSSFWAFESNSYYLGSAPLFLNDLLAKWAPDLDQSDGVIFAVPDRDLLIARPVTTGEDLMNGITAMVRIAMRFGLGNPTSISPRLHLLRDNQVTTFTDFRVVSPEMEAEWEDSAFDAPPAGAIGIEVRPDPYLMERLQQGGFGDFGDFGKPRDLDM

SEQ ID NO: 159 - DNA, 730 bp, Corynebacterium glutamicum
  CDS (101)..(700): RXA01544
ctagatctataacgaggatcggcgctactttaagcatgtttgtgctgttggcgccgattttttcatagctgtacacacataaggcaacaggagaaatacagtgaaacttgacgacgctatggtcatgatcgaacagcgcctggtcaaaggtcgcggcgcaaccaagacgcaactagcaccctatgagcatatccagcgcaatattgcagcccgagggttgagagccgatgacggaggctcgtgcttcggttatggggatgcgtcgctgagtaatgacgatgtagcaactgctgcagaagatattcaggatttgtttgcgtgcgggcatacggttatctcagcgattgtcgtttttgataagagctatctcagtgagcatggaatcatgagctttgatccgaactattttggtcaggatatttatgcggacacccatccagagattgatctcatggaattgcgtttagccgtgatgaatgggctcttggggcttgagggaacgttttttgaggatatgcgttatgtcgcatctatcgaggtgagccggagctatgtctatgcgcacataatgatggcggatgcaggcgttgacgatgcacgcggtaatgcacaggtgaagattacggacaccgaacgagtgctgtttagacgtggtgttgaatcccggtttgtggagcaagaggcacgcaacgtcgtgctttagccaaggtgaggcatcaagagaagcaac

SEQ ID NO: 160 - protein, 200 aa, Corynebacterium glutamicum
VKLDDAMVMIEQRLVKGRGATKTQLAPYEHIQRNIAARGLRADDGGSCFGYGDASLSNDDVATAAEDIQDLFACGHTVISAIVVFDKSYLSEHGIMSFDPNYFGQDIYADTHPEIDLMELRLAVMNGLLGLEGTFFEDMRYVASIEVSRSYVYAHIMMADAGVDDARGNAQVKITDTERVLFRRGVESRFVEQEARNVVL

SEQ ID NO: 161 - DNA, 1138 bp, Corynebacterium glutamicum
  CDS (101)..(1108): RXA01548
ggcgtgcgagctgctggttggcgcttgtgcaccccgtttttgtgtaataacttatattctagaaacttcaataacttagtaactttaaaaggggtttaatatggctgagaataatggcgggtcggatgaccttaagcccatctctgtcgatggggtcgtcaatggggaagtgcgcagcgacaaagaaaagcaggcgttcgagaagattaccggtgatgatctgcgtcgtcgtgcagaacaaatccgtaaacgtcgtttagcaaaagcgcaagaagatgcacgtaagcgtaagccattgtttggtttgggtcgtatcgctgtcacagtactggctggcgccgtatttattggtacaacgttgtggatcagtaccacctcgggcggctttgacgacaaggtgagtgcaaacaatgagcagattgtcactctgcgtaatgaagtcaacgacttaaaaaacactgcagagacaatgcccaaaaaagagactcttgctagtcaatttgacgcagcaacctcacgtgcacagaatgtggctgacttacagaatcagttagccggcattattaccagtgttgatgatgatgccgcgaccgagcagttcaagacaattgttgatgagctgaaaccgaaattcacggtctctgctggtacgacaggtgaatttcctgcggcgggtcgttggtaccagccacaagaagttgttgtcggagataacaaccgacccacctgggcgccgatgggggctgagtcctggggatggactgtgacccctacactgtcgatgtcagataccgagcacgttgtggtgatgtgggaggcccgcttgaccggaggtgagcgtgacggtgcgctgttggcgtgggtgacagccgattacaacatcaacaccggcgtgtttagctcgctggcgttggcgcatacctatgaaggacaccagcgtattggtgcaaccacctcaccaagtgaatttggtgcccacggcacaaatgcagaggcgagcgctgcacgtgctggcagtgaaggcggggggcttgagggcgaggctattttcgttgatgagctgcagcgggcactagagatcgctcagctgaacaaacaggagaacagataatgacgacacgaaatgtagataaccaga

SEQ ID NO: 162 - protein, 336 aa, Corynebacterium glutamicum
MAENNGGSDDLKPISVDGVVNGEVRSDKEKQAFEKITGDDLRRRAEQIRKRRLAKAQEDARKRKPLFGLGRIAVTVLAGAVFIGTTLWISTTSGGFDDKVSANNEQIVTLRNEVNDLKNTAETMPKKETLASQFDAATSRAQNVADLQNQLAGIITSVDDDAATEQFKTIVDELKPKFTVSAGTTGEFPAAGRWYQPQEVVVGDNNRPTWAPMGAESWGWTVTPTLSMSDTEHVVVMWEARLTGGERDGALLAWVTADYNINTGVFSSLALAHTYEGHQRIGATTSPSEFGAHGTNAEASAARAGSEGGGLEGEAIFVDELQRALEIAQLNKQENR

SEQ ID NO: 163 - DNA, 1789 bp, Corynebacterium glutamicum
  CDS (101)..(1759): RXA01549
cacagcttgatcaggcagtggaaaatactcaggttgcccaaggttccgatgctgttgaattccgtttctagattttttttattgattgtgagagtgcattgtggctaatgattttatagaaccaaatgatgcccccgatgcacctgataatggtgactcgggaagctcggggtttgttgatgaagcaaaagataagacccgctcagctgcacaaggcttaggttatggcgcactacgtgtaggttttggtactgcagcacttgcagccaatggtgctcgctctatgggtaatttggctaaaaacctgtggacacgaatgatggggcttgccctgtctgccggtactggtatctctgctgccacaggtggcatgatcactgcacgtgtaggcgcaatgctggcaggtacaggctcggtgttgtcgtcggtgacgactattgcgttgattgtgtcgatgattgtggtgccggcaggtcgaaaagacggcattatcgagttgtgtgagccgccagtaacggccaacccgtttaccattgacgcaggtgatatgactgagaacgcgaagttggtgtacggtgcgctgtcgtatcttgggatgaatgatcaaaatatcgccggtgtcttgggcaactttgagacagaatcaggtatcgacccgactgcggtggagggtatttttgatgaaccaaataccatcggtcctcggaagagagctgcgtgggataagaactttgaacctcagccgatgggtattgggcttgggcagtggacagcagggcgcacacagatgttgctagattttgccgccgatagaaaccgagactggcattacatcgacgtgcagcttgcatttgctattagtggcgataatgaaagcgatcgcaaggtttttctggaaatggttgataataaaaactccagtagcaatagccccaccgcagcgtccgagtacttcctgcgtgagtgggagcgcccggcagatgtcgcaggtaatgcacccattcgtgcagagcaagcatctaagtggtacgcgcagatgggtggttggcaaaagaactcaaccttgggtgagtctgtgatcgctatggctgatggtgcagcagcaaaatccacggcgcgtgatgagcaggatgctcttaatgattgtcctgaagaggaccgcacctcaggtggaaatacgtccgctgcagaagcaatggtgactatttcacatccttatctggctgattctcgtggcaatgacggtactgatatttaccgctatatccatgatgaagtgctcaccggtgatccgtattacgcatcctgtgaccgtggcgttgctaccgctattcgctggtcgggcacggatgatacgttcccagcaggtccaacagcagcacagtatgaatacgttgtgggcacaggatcgggccgttgggaggaaatcggcaatcttgccaccatgtcagagaacgatttgttacctggcgatgtgcttcttggtgcaccgaatcacgttgcgatgtatgtcagcaatgaggttgttgtggacatgttgggccctggtaatgcagagcctaatgcagctattggtcatgcatcgttgaatgaccgctcacctggtctggataccttgagtctggatggatggggcgtgaacttcaaggtgttccgcaacacccaggctgagacaaactcagtgttctctggtgtacagattccggctggtaaagaaattggcgaaatgactaacccaactcgaactactcctgcaggataagtttttttcatcgctgggttggtgtga

SEQ ID NO: 164 - protein, 553 aa, Corynebacterium glutamicum
VANDFIEPNDAPDAPDNGDSGSSGFVDEAKDKTRSAAQGLGYGALRVGFGTAALAANGARSMGNLAKNLWTRMMGLALSAGTGISAATGGMITARVGAMLAGTGSVLSSVTTIALIVSMIVVPAGRKDGIIELCEPPVTANPFTIDAGDMTENAKLVYGALSYLGMNDQNIAGVLGNFETESGIDPTAVEGIFDEPNTIGPRKRAAWDKNFEPQPMGIGLGQWTAGRTQMLLDFAADRNRDWHYIDVQLAFAISGDNESDRKVFLEMVDNKNSSSNSPTAASEYFLREWERPADVAGNAPIRAEQASKWYAQMGGWQKNSTLGESVIAMADGAAAKSTARDEQDALNDCPEEDRTSGGNTSAAEAMVTISHPYLADSRGNDGTDIYRYIHDEVLTGDPYYASCDRGVATAIRWSGTDDTFPAGPTAAQYEYVVGTGSGRWEEIGNLATMSENDLLPGDVLLGAPNHVAMYVSNEVVVDMLGPGNAEPNAAIGHASLNDRSPGLDTLSLDGWGVNFKVFRNTQAETNSVFSGVQIPAGKEIGEMTNPTRTTPAG

SEQ ID NO: 165 - DNA, 2272 bp, Corynebacterium glutamicum
  CDS (101)..(2242): RXA01554
tggcttaaaccttatttgtagttgtcaataaatatgaaattccttagcaacttgtttaaatagacgtataaacaagtttgaaaaaggaaggttatccatcttgaaaaagcatgtgacctcagccgttaccgccgtggtgacggctttttcaacggctgcgcttggtttaagtattgccgtttctcctgctgttgcccaagtggctaatccagctccagatctttctgcgccgtatacatgggtggaagagtttgattccgaggatgctctcaaagggtggaacattttccgccagccagattatggcagcgacaaagttctctataccgaagatgctttaagtatcgaagatggcaagctcaccatcaccactcagcgccactgcgttgacgaagacttcgcgatcagtgatcctgtcaaccgcggaaagctcaatgacagcaccgcgcaagttgaaccttgtgctccaggtcagtttgaaaagttcaccagtgcgcgcatcgtcactccgaaaattgctcgtggagagttcgacctttctgtcactgcaactcttaacaccggtggcgtcgaaggtgtccgaagtgccatttggatgcaaaacggtgaacaggcgtgttcctcagcaaccaacaatggcctctacggagaactagacctggtagagcacttttcttacgatcttcgctcgccatggtctccatcaaacacccacttgggttgtgatcctgaaagtgtcaacggcaccaaccgtgcacctcgtgaacttaaactagatgagtcactcgatggcgtggagcacacctggactgtgagcaccacccgcgacggcgttgagtacttcattgatgatgaggcgattaaccgccagtcatggcgcaacgatgtcactttggggcatgccgaaattgatgatttcgggatctccgcgcagacgtttgatgagatcgtcgaccgcgaatggactctcactcttaatcaaaaggtagaaagcgccgactgggcaaaaccacgttcctctgaggaagatttcccagtccggtccatggtgattgaccgcatcgaggtcaccggatctcccgcagtatctgaagacacccccatgccagataccacccagcttttgacccaagacactctggaatacctcggtcgcatgccagtgctggaacgctacgagccagcaagtgctgattttgccgatggccgcaggccttcctggaactacttcaatttgaaggaatcgtggcagaatccagaactcgagcaacgcccagaagctgtcgaattcgttgatggacgcatggatatcgtgacccgtcgccactgtctggccaccactgatgacatcgccactccggaaaacgcacaggaggaaccgtgcgcgccgggtgaggtgacacgctacagctcagcgcgtgtccaccttccagagatccccgccggcaacttccggctcaccgtgcgcgcacgggcgcagtccgaagagcttgtcgacggcgtccgccccgctatctggatgcagaacaataccaacttctgtgctgacaacgatggacgcccttatggtgaactggatattactgagttctacagctctcgtgtgaacacccagtactcggcagtacaccttggatgtgctggcaaccgcccagagatgaagcttcgccaaatggaaatggaagagtccatgtttggggattggcatgactggggcgtcgaagtcttcgacggccagatcgtattcaccattgacggcaaggcagtaacttcctctggcaaagatgtctttggcaactctgttaccccagccgctgcacctcttcgccccgcgcacttcaagttgtcggaagaggaataccgtgaagtcatcgggcagccttggcaccttattttgaacaccatggtggagcagtctggcaaagacagctggattacagcggtcgacaataacgaggcgttcccagaacaccgcttccaaattgaccatgtggcagtagatatcgagtctgactctgtggacaatgtatggcctgacgctgcgaatgaaatcccagacaatgttggtattgaagactctgatgatggcagcgacctggaggttggttcgaccggaagctctacagctgagaccgtgagctggatctcgttgttcaccgcgttgagctcgctggtcttcacactggctctcaatcaagaagcattgcagaatttgattaatcagttcatgagacagttcaagtaatccttgtgggcgctttgtctacttcac

SEQ ID NO: 166 - protein, 714 aa, Corynebacterium glutamicum
LKKHVTSAVTAVVTAFSTAALGLSIAVSPAVAQVANPAPDLSAPYTWVEEFDSEDALKGWNIFRQPDYGSDKVLYTEDALSIEDGKLTITTQRHCVDEDFAISDPVNRGKLNDSTAQVEPCAPGQFEKFTSARIVTPKIARGEFDLSVTATLNTGGVEGVRSAIWMQNGEQACSSATNNGLYGELDLVEHFSYDLRSPWSPSNTHLGCDPESVNGTNRAPRELKLDESLDGVEHTWTVSTTRDGVEYFIDDEAINRQSWRNDVTLGHAEIDDFGISAQTFDEIVDREWTLTLNQKVESADWAKPRSSEEDFPVRSMVIDRIEVTGSPAVSEDTPMPDTTQLLTQDTLEYLGRMPVLERYEPASADFADGRRPSWNYFNLKESWQNPELEQRPEAVEFVDGRMDIVTRRHCLATTDDIATPENAQEEPCAPGEVTRYSSARVHLPEIPAGNFRLTVRARAQSEELVDGVRPAIWMQNNTNFCADNDGRPYGELDITEFYSSRVNTQYSAVHLGCAGNRPEMKLRQMEMEESMFGDWHDWGVEVFDGQIVFTIDGKAVTSSGKDVFGNSVTPAAAPLRPAHFKLSEEEYREVIGQPWHLILNTMVEQSGKDSWITAVDNNEAFPEHRFQIDHVAVDIESDSVDNVWPDAANEIPDNVGIEDSDDGSDLEVGSTGSSTAETVSWISLFTALSSLVFTLALNQEALQNLINQFMRQFK

SEQ ID NO: 167 - DNA, 1165 bp, Corynebacterium glutamicum
  CDS (101)..(1135): RXA01574
aaaaatccgcacaccccacattgctcaaaggaattgacaaggcgcttcgcaaggccgagtaaggtgggcaacgagtcggtgagagtatgaggaatatttgatgagcaacaaacgcatcggtgtagtgatcgtttcctacggacacgaacaagatgttgccaacctggtagacacatttgcagatcagctgaaaactggtgaccgcgtagttgtcgtggacaaccgcaaaccttgggtgttaaaagacgccgtgggggagcgcctggaaaaacacggcgcagagatcatcaaccacgacaacggtggtttcgccgctggctgcaacgtgggcgcagcgcacatcgtggatgacgttgacctgctgttcttcctcaaccccgacacagtgatcgacgatcccaccctgttcaattcgctgagacgcgtcgatgaacagtgggcagcattcatgccgtacctgctgcttcctgacagcaccattaactccgcaggcaacgccctgcatatttccggactgtcgtgggtgactggtctggatgaaaaaccagttgaaggctcatctgaagttaccgatatttccattgcctctggcgcctgccttgccgtgcgcgtggactggtggaaacgcctcggtggcatggaagaactgtatttcatgtaccacgaagacactgacttctccgcccgcttgctgctggccggcggtcgaattggtctcctgcattccgcgtatgtcacccaccattacgactacgccaagggtgactacaagtggatttacatcgaacgaaaccgacacgttttgctgctcagcgtgctgccgcttccattgctgttcgtgctgatcccgcagatcctcggtgtgaacctgggactgtgggcgattgccgcaaaggaaaagagggtcggactcaaggtgaagtcccttcgcctcctgatccgcgatctaccagcgattttcaaactgcgtaggagcacgcaggagcttgccgaactcacaccatcgcaatatctggcaaaaatggaatggcgcctagacaatcccaacctaggcaacattggatccaacaagattgttgcgactggatataagacctattacaagttgtgtatgagtatcctgaaattgctcgcttaacaccccataaagagggtgaagatttaa

SEQ ID NO: 168 - protein, 345 aa, Corynebacterium glutamicum
MSNKRIGVVIVSYGHEQDVANLVDTFADQLKTGDRVVVVDNRKPWVLKDAVGERLEKHGAEIINHDNGGFAAGCNVGAAHIVDDVDLLFFLNPDTVIDDPTLFNSLRRVDEQWAAFMPYLLLPDSTINSAGNALHISGLSWVTGLDEKPVEGSSEVTDISIASGACLAVRVDWWKRLGGMEELYFMYHEDTDFSARLLLAGGRIGLLHSAYVTHHYDYAKGDYKWIYIERNRHVLLLSVLPLPLLFVLIPQILGVNLGLWAIAAKEKRVGLKVKSLRLLIRDLPAIFKLRRSTQELAELTPSQYLAKMEWRLDNPNLGNIGSNKIVATGYKTYYKLCMSILKLLA

SEQ ID NO: 169 - DNA, 757 bp, Corynebacterium glutamicum
  CDS (101)..(727): RXA01585
tgcagactgctgcgccccgttccatcagcaaggtggagcgcaaggtgctgaccgctgtcgctactgatgaggtgcagtcgcaggaagctctagaaaagtagtggttgagactctttctatcacctcaggtgcggctggcctgcaggcgcttgttgcgcgtgcggttggtttggatgagttggcgagcgcgcgtttccgccagctcacgccagaggtcgttgatgtttttgtcaccactccgttcaacgtgacggcgtcgcgccgggtatttggtgtggcgggtcgcgatggcgctgcagttggcgcgaaggatttgctgcaggcactcagcgagggccgggaagacgtaggcacctcccgcgacgccagctggccgggctcattgccgccagccacgggctttacgcttgtcgacgaactccccacccacgtggtgcgcactttggctgatcagggtcaggcattggctcgccagttctccggcccgcttggccctccggcttcgttgatggatcaggaagttatttcagcagaaggcaatggcaagaaggccggaatcccgatgcgcacggtatttacctgcacttcgcttggtttgatcccaggttttgaggcagccaatgatgtgccgaggcacctgcgggtatcggtgaatggtcgttggacccgcgttgatgctccctatggcagtgtttatcactcgtcaggtttgggtctgagcgttttctaaagcaagacccagcctgcaagggccgca

SEQ ID NO: 170 - protein, 209 aa, Corynebacterium glutamicum
VVETLSITSGAAGLQALVARAVGLDELASARFRQLTPEVVDVFVTTPFNVTASRRVFGVAGRDGAAVGAKDLLQALSEGREDVGTSRDASWPGSLPPATGFTLVDELPTHVVRTLADQGQALARQFSGPLGPPASLMDQEVISAEGNGKKAGIPMRTVFTCTSLGLIPGFEAANDVPRHLRVSVNGRWTRVDAPYGSVYHSSGLGLSVF

SEQ ID NO: 171 - DNA, 6592 bp, Corynebacterium glutamicum
  CDS (101)..(6562): RXA01590
tccgcatgtccattagtgatatgacaaaagaataaagaaaagggaggactttagtatgtccaaaactttatttcgacacgcttttgaacggtcgcttgagatggcgcgctcagagtggggtcaaaaagatcactggggcaaagctccactgggtgatcacgatgctgtgcgtatctataggcaagcagaagccttgatgaaacagcgcgcagcaaacaataagggcttagacctcaatgatgaagcgacctatggcgccatcatgtttgcgtctttcgatgatgccttcgccgctgatgccgaagctcatggctgtgtacaccgaccacagttcgcgaaggtaactaggcgaaatattcttaattcaccgcaatacacggcgattaagtcatcttatgacgcgctggtgcagcaggatctcgtggcccaacagcagcaggcacaagcgctacagcaagctgcttatgagcaagagcaggcagctattttccaggcacgtgatcaagcaacattccaggctgaacaaacgctcgcgcaagagtccgttcgccaatcagagggtgtgggtttacctgtcattgatccgatggagagctatttccgggagtacgccttctatgaaggtgtcgagatgtttggtacctggggtacgcacgttgatgctggtgtgtcgcagtttagcacctctgatggccgtgcgatccgagcgcttgttgatgagcatctcgcaacctatgaaccagtagagcagcgggggagtactcaggcattcttcgcctctgtcaatgctgcctttgctgaggtggcacctcacgcagcacccatgtttagtgcgattgctcgcgagggtgagggttcaaaggggtaccaggcgctgcgtcaccgtttcgacaagatggtcggcactgcaattggacctaatggtttgcctgagggacctgatctgggtggtcgtcgtttacctatttcgccttatgatccacgctggtcagaccgcgaagtagtccgtgtgcacggtaccaagctgctatcactgtccgaagagagtgttggcatgatcagggaccttgatctagcaacgatccacctacaagataatgatgtttacgagggcactcatcgagaagacgacactaaaggcggtgtgcgaccgttgactcaatgggtcaatggtgaagctattgcctggcgcactatcaccgagaatgaccagatgcgactgcccaatattggtcagtttatgacggctaaagaataccgtgccgcagcgtcatggctgcgtgctggactcattgataccgcagatgttgcgagtcagaaaattgaccccaacaaggtcatgtctgatgagggtatcgcgcgctcggaagctattttgacgtatctgtcggatgagggtgtggattttaggatcgagccagatcgtgagccgggacagcttaaagtgcgtattgagggcacccgtattgatattcgtctcactgatactcgcgccaatgaacagtgggtgggtcgtgtctatgattctggcactgtgattaagtattccgccgaacaaacagcggaagaacgtctacgagctcgtgagcgcatggagaacggtgatggaacgtggacaccggctactgattatgaaccaagcccaactgaagttgtcgatctcgtgaaatttgctctcggtcgagaggttgagcgacaggatggcaaaggtcttgttggtgtgcctaatgctcgacacccacgtgctttagagcaggcacaggatgcatatttcactaagaatcgttccgcattcatggtgcgtgaagggctctcgatcgttcaggatgcacgtgatcgaagtgctggtcctggaaagtggtttgataatgaagcgaaagcatcggagtggcttggtaacaatatcgcccttactcgtgcgcgtgtggccgaagagctcggcgttgaagaactgattgcgctttctgcacagtacgccgatgatcctgacttcatgccggcttttgctggtgaggatgagctcatggcgataaagcaggactattgggcgatgctgcgaggtgaggaaaccgatctgcttaaccctggggttaaccgcgatgattatatggctgctatccgcgatggtgatcatgagcagattgctgcgatgacctcagcaatgaatgctgtgaccgtggaggatcgtgtgcgtcagcacgcggcccttgttcttgatgattatgtcggcacggtggagcctgatcctgttaccggcttgcgttttaatccggtgacagttgctcagcacatgccgagtgctaaatccctgtggtcaaaccatgacgatattattgccgcgttgcgagcgacttcgattactggcgatgaactgcgcggtgacgaattctataacgatgttattaatcaacagttgctcaaatttaatcctgagaccgcgcagaaaatggttaataaccctgatcttgacccgcagttggctcgatttggcactgtcattgccgagactatttcccgcaatggtgctgatgtggtcgatattgctgttgacgataacggtgtggtgcggtggaccgcacagcgacgtgttggtgcgaaggatagtcgtgcagtagatagtaaggggcaggttcgcggtgaacgcacccgtcatgtgcagggtgagataggtcagatttttactcgcggtgagcatggtgaaattgtcaccaaatttaatggtggcgagaactatatgtttgcccctggctacaccgcgtctgtggtaccacaaaagcctggtgagacaaagagtttagaagagcgtaccaagctcaaaggctatgagcaggtgatgtcagaggcgttggtgtaccgtgtgcgagaagatttgatgttcactgagcgatcccgagtgggtgctacaaccagcatcaacagtgcatataagcgactgtatgacaatcgcttccctgtggacttcttcgagcgcagcgccgaagaaggtttgagcgatgagtggcgtgctgcgttgcttgagactgcgagtttgcgtgtgcgctacgacaactctattcgtgatggtgcgaatgtgatggaggatattcgagcacagcagcgtggttttgatgcgcgtaatgataactcccgtgatgcgctggtgcttaccggtgggcgtaacatttctgtacttgatgttgatgcgggtaaaggtttctttgatcccatgatgactggtatggcggcgaaccagggttctgttcgctatttgttgccttctgcgaaggtgggcgctgatggcatgattacccctggtgatccggctgatcgagtacctgttgcagcgcatccagaatcatgggcgatgggctttgacccacatgaccgtcagaacatgactttctcgaacatcatgcaggctagcgctgtgactggtggtgcacgcactgcgatgatacagctgggcggttggaactttgaagatggcattattgtctctgccgattttgcgaatacccatgttattcgcgatacggaagatgagatgcgccccttggttgccggcgataagctgtctgattttcacggtaataagggtgtgatcgctcttgttgttgatccagcgatgagtgatgctgatgcacgtgcagcagggctggaatcagaggtggcgtttttccgagacaaccctgatctagaggttgtcatgagtccgttttctgccatttctcgttttaatggtggcacggcacgtgagctcatgaacaacccgcaggatgtggtgttcaggaataatgatggttctactcgtgttcaaccaggtgcctctggtgatctcaacttcatcgtcacgcatatggctgttgatgcgaaaaccaatgtctatgatgaagaagctgttcgtgagggccaaggacgtaaagcgtcttctcagctggcgtgggtgctccaagcccaggaatgtcatgagattatggagcacttttatggcaacaacgtctctgcattggctaacttccaggaatatcttcgcgtcacggggcttgatgtcaccccgtatggtgagttgcgcgaggggttcagcgagtccaatgagcagcgcaatatcatcgagatgccaagcatttacgatgagaacggtgagctgaataatcgtgttaatcgtgcacaggtgcgcgaagcttttgttgagcagatcagtcgcgctggtggtgttatggagattcctttccagttacagttgcgcaatggtgcacagctagaagagtcacctaataatccagacatgtatcagttgccactactgagcccgcatttgcgcagtgatgaggatttagcggacggtagtacctctcgacatgagtacaccacgcggtatatggctatttttgatacgtgctacaagctggcagaagagcaagccaagattgacgcattgcgccaggaggaagcgcagcacggcacgttgcctcgtgctgcggaaaagcgactgagcgagtcacagaagtttgttgatcaagcacagaaaaaggtgcaggcaagctttgatggaattgctaatgatattgtcgccagccggatcgagaccaagaacaatgtgttcaaggacggctttatgtcggcgcgacagtcacactccgctactgctgtgtggacaggtgatccacgcctgtcagttgatgaagtagccatgaactcttcgatggcacgtgaactcggcgttctcgataacggttatgcaatggtgtggcgtgatccggtgatccgcgatggtggtgtgcgctatttgcgtgtggttattaatgatgatctgcacggtgtggcagtcaaccctgtgtcggtgaagagctttgacggtgacttcgatggtgactctgtaggtctggtcggcaatctgccgaaaaaggcgcatgaggaggcattgtccaggctcacagttgaggcaaacatgcttgatcttggtgatggtaagcgtatggaggacggcactatgttttatgggctaactctgcatgacagcctcgatgtacaggtagcgcagcaccatgatccggcaatggccgagaacatgaaggttattgtctctgagcttaaccgctaccagcgtgaatacgaggccggcgagattagccgcgaagaattgctagaggtcaaccgtgcacacatggatgatctcaatgagcactatgcacaggcttttgccaaccgcgatggtttggtgaccttgcgttttgacggtatggaaaaccatatggcttctgttgcgcagtgcttcgagacgggtgcgaaaggttcgcctggcaagctgaaggaatatgccacctatatcggcgctgatccggcgcagggttttaaagacgtaggtcaaccaacgccagaagcgctgcgtagccactatgagggttcgcagaaggcgactgcaattaaggtgctctttaccggtgtggctggtaaaaaagagcaggaaatggtggcattgtgccgcaatcttggtctgaccaaggaagctatggctgcatcagcaccggcacagcagtcgattctgcaggcgaagcacgacccgattgacgcgctctatcgtgcagaaactcttatgggaccagtaggtgatctctaccaaggtcgcaagatgcgtcgtggtgagaatgagcaaggtcgctatgagtgggaagtcgttagggacgagaaccaccagcctatccaggccaccaaggatgaatgggtacagcagtacatggagatgtacgccgatgacaagggtatgggtgtctcggttggcgttgaccaggtggagaagatcgcggaagaattctctgatgagcagggttatatgcgtgtgcttagccatgatgagctacccactgagattaagccactagcacttgatcagcttgcctatggcgataagaagaaccgctttgatttgttgtgcgagatggcaaagcagcaggtcaacatctacgacggtgatgcttatgactttgcccctcgtgtggtgcgcgccaatatgaaggcaatggaggatgcagcgcgttttggtatccctgatgtggagattcagtcgatttctgcacagcagtcattggcgagctttgagcgagtcccacaacgttctggtttccgtattgagcgtcgtgtgccggcagaagtaggtacagggattgctgcaccagcaccgttacctgatgcaggtgtacaggggaattatgttcagcagcaggtgcctgcgaccccgccagttatgcctgtcacacctccggcacagcaacctgtttcgcctgctcagacggacttccggggcgttggtcagccactcgaccagggcggaaaaatcgggaattatggacatcagggacctgcaatgggggcgcaacagccagttgtgcctcagcagcagaatattccgcctgtgcataatccggtaccacagaattctgttccgcctactccggttgtgccgaagccaggtacaggaaacccgtttactcatggtggtgcgaacaatcagtttatgggtcgatttgatacaagccgttacaaccaacaggaaccaccacaacgacaggatggcgggtttgagctctaaataatggcagtagatttcagcagaaaa

SEQ ID NO: 172 - protein, 2154 aa, Corynebacterium glutamicum
MARSEWGQKDHWGKAPLGDHDAVRIYRQAEALMKQRAANNKGLDLNDEATYGAIMFASFDDAFAADAEAHGCVHRPQFAKVTRRNILNSPQYTAIKSSYDALVQQDLVAQQQQAQALQQAAYEQEQAAIFQARDQATFQAEQTLAQESVRQSEGVGLPVIDPMESYFREYAFYEGVEMFGTWGTHVDAGVSQFSTSDGRAIRALVDEHLATYEPVEQRGSTQAFFASVNAAFAEVAPHAAPMFSAIAREGEGSKGYQALRHRFDKMVGTAIGPNGLPEGPDLGGRRLPISPYDPRWSDREVVRVHGTKLLSLSEESVGMIRDLDLATIHLQDNDVYEGTHREDDTKGGVRPLTQWVNGEAIAWRTITENDQMRLPNIGQFMTAKEYRAAASWLRAGLIDTADVASQKIDPNKVMSDEGIARSEAILTYLSDEGVDFRIEPDREPGQLKVRIEGTRIDIRLTDTRANEQWVGRVYDSGTVIKYSAEQTAEERLRARERMENGDGTWTPATDYEPSPTEVVDLVKFALGREVERQDGKGLVGVPNARHPRALEQAQDAYFTKNRSAFMVREGLSIVQDARDRSAGPGKWFDNEAKASEWLGNNIALTRARVAEELGVEELIALSAQYADDPDFMPAFAGEDELMAIKQDYWAMLRGEETDLLNPGVNRDDYMAAIRDGDHEQIAAMTSAMNAVTVEDRVRQHAALVLDDYVGTVEPDPVTGLRFNPVTVAQHMPSAKSLWSNHDDIIAALRATSITGDELRGDEFYNDVINQQLLKFNPETAQKMVNNPDLDPQLARFGTVIAETISRNGADVVDIAVDDNGVVRWTAQRRVGAKDSRAVDSKGQVRGERTRHVQGEIGQIFTRGEHGEIVTKFNGGENYMFAPGYTASVVPQKPGETKSLEERTKLKGYEQVMSEALVYRVREDLMFTERSRVGATTSINSAYKRLYDNRFPVDFFERSAEEGLSDEWRAALLETASLRVRYDNSIRDGANVMEDIRAQQRGFDARNDNSRDALVLTGGRNISVLDVDAGKGFFDPMMTGMAANQGSVRYLLPSAKVGADGMITPGDPADRVPVAAHPESWAMGFDPHDRQNMTFSNIMQASAVTGGARTAMIQLGGWNFEDGIIVSADFANTHVIRDTEDEMRPLVAGDKLSDFHGNKGVIALVVDPAMSDADARAAGLESEVAFFRDNPDLEVVMSPFSAISRFNGGTARELMNNPQDVVFRNNDGSTRVQPGASGDLNFIVTHMAVDAKTNVYDEEAVREGQGRKASSQLAWVLQAQECHEIMEHFYGNNVSALANFQEYLRVTGLDVTPYGELREGFSESNEQRNIIEMPSIYDENGELNNRVNRAQVREAFVEQISRAGGVMEIPFQLQLRNGAQLEESPNNPDMYQLPLLSPHLRSDEDLADGSTSRHEYTTRYMAIFDTCYKLAEEQAKIDALRQEEAQHGTLPRAAEKRLSESQKFVDQAQKKVQASFDGIANDIVASRIETKNNVFKDGFMSARQSHSATAVWTGDPRLSVDEVAMNSSMARELGVLDNGYAMVWRDPVIRDGGVRYLRVVINDDLHGVAVNPVSVKSFDGDFDGDSVGLVGNLPKKAHEEALSRLTVEANMLDLGDGKRMEDGTMFYGLTLHDSLDVQVAQHHDPAMAENMKVIVSELNRYQREYEAGEISREELLEVNRAHMDDLNEHYAQAFANRDGLVTLRFDGMENHMASVAQCFETGAKGSPGKLKEYATYIGADPAQGFKDVGQPTPEALRSHYEGSQKATAIKVLFTGVAGKKEQEMVALCRNLGLTKEAMAASAPAQQSILQAKHDPIDALYRAETLMGPVGDLYQGRKMRRGENEQGRYEWEVVRDENHQPIQATKDEWVQQYMEMYADDKGMGVSVGVDQVEKIAEEFSDEQGYMRVLSHDELPTEIKPLALDQLAYGDKKNRFDLLCEMAKQQVNIYDGDAYDFAPRVVRANMKAMEDAARFGIPDVEIQSISAQQSLASFERVPQRSGFRIERRVPAEVGTGIAAPAPLPDAGVQGNYVQQQVPATPPVMPVTPPAQQPVSPAQTDFRGVGQPLDQGGKIGNYGHQGPAMGAQQPVVPQQQNIPPVHNPVPQNSVPPTPVVPKPGTGNPFTHGGANNQFMGRFDTSRYNQQEPPQRQDGGFEL

SEQ ID NO: 173 - DNA, 1216 bp, Corynebacterium glutamicum
  CDS (101)..(1186): RXA01628
attaagaaaaaatgaattaaaccaaaacttcttaatcgcaggggttaaggtaagttcagctaatcaatgaaacttcccctttcagcccgttgaagaaccaatgagccctgcccgcacccagccccgagcggctttcctaaggaagctccgacccatcacatgtagcctttccttggttctcgtagggtgcagcaacacggcagagtccacgaccaccgatacggcaggctccactgaaacttcatcacagatttcacccaccactccagtcagcaccaccgaagcagcgccgcctgaagatccaagcgcaaacgctttggaagagtatgctcagatccttgccaatccaagcatctaccccttaaccgaaatttcacaattcgtccccacaggcacatatgcctacacacttgttgaagcaacttccgattccatcccagaactactactccgcgccgatagtcacgaattcgcgccaattttggttttcacctatgacgaaaacacacaatccgcaacccaagctggaggagtcctaattgacggtgtcgccagcgccggcggttcacgagtcaaggtcagagcttcaaattcaggagcaggaatctaccaattgaattggtactcgatacaaccagttggcgaaagctctttgtacggaatccaaggaaactccctgacacaaatcgcagaccccgaggatttcatggtccgtgaactattacctgaccaccacgaaattacctgggttgattccaacgacccctccggcctatcaaccgttcagactggtggagccaacattcaacaagcagccccaactcccgttcaacagcctgcgtcaaacctgcactacttctctggtgtagtaacgatgcagaccgccggcgaactcatgcgaggtgaacgaactcccaatggtgagcctgccactgatctctatctcgtactggtccttgattccccaattgaaatcacagcacgaaacgcagctacagaccctcagactcgtaccatttccgaagtcagcctcggccgatacatccccgctgatggtgacaatgattggataggctacctcgacacccacgtggaaatcactgcaacaacggatcaggtctggttcccaaccgacaccggtctacctcttggaatgcttcgtctagcggactacaaaagcatctcataaaccgacgcagcactcgtcgataagcac

SEQ ID NO: 174 - protein, 362 aa, Corynebacterium glutamicum
MSPARTQPRAAFLRKLRPITCSLSLVLVGCSNTAESTTTDTAGSTETSSQISPTTPVSTTEAAPPEDPSANALEEYAQILANPSIYPLTEISQFVPTGTYAYTLVEATSDSIPELLLRADSHEFAPILVFTYDENTQSATQAGGVLIDGVASAGGSRVKVRASNSGAGIYQLNWYSIQPVGESSLYGIQGNSLTQIADPEDFMVRELLPDHHEITWVDSNDPSGLSTVQTGGANIQQAAPTPVQQPASNLHYFSGVVTMQTAGELMRGERTPNGEPATDLYLVLVLDSPIEITARNAATDPQTRTISEVSLGRYIPADGDNDWIGYLDTHVEITATTDQVWFPTDTGLPLGMLRLADYKSIS

SEQ ID NO: 175 - DNA, 1381 bp, Corynebacterium glutamicum
  CDS (101)..(1351): RXA01642
cttgaaaggttggaatcactgtgtcttgcagctagtctgccactcgcactgcatttgctggatgtatttggaatgctgcgcggtcttgatattggattcggtggataagatgcgcagactcatcgcggttagcttggccgctctgtttatgttggcttccactccagcgacgagggcacaggaagtagaagctctcgcttgccccgaggtagcgatcgccgatccttcctccgcagttttagatgaacacctttcgcagtcattatcccaagctcaccaactagcaactggcgccggtgtgatggtggcagtcatcgacaccggagtatccctgcatccacgtctgccccacttaattcccggcggtgatttcgtgggcgcccaccaaagccccgatgtgccaggtgaacttatcgattgcgacggccacggcaccatcgtcgccggaatcatcgcctcccaaggaaaccccggcaccggctggccatatgacggcagctccgatccttatatcggtgtcgccccagattccggaatcatctccattaaacaaaccagctcatatgtgcgtactcgtgaagattccaacgtcggaacgctgagcaccctggcggaatccatccaccgagctctcgattccggtgcccacgtgatcaatatttccgtggtgtcctgtttgccccaatcacccgacgaggccgcatcgttccagcctctgacggatgctcttaacagagcagaacttcaaggggtgatagtggtggcagcagcaggaaacctcgggcaggattgtccagttggatctaccgtttatcctgcacattcagacactgtgctctctgtgtcggcacgttttgattctcacacgcttgcagaatattccatgcctggcaaccaacaaatcctctctgcaccaagccacattcaggctggtctatcaccgcgtggcgacggcttcgccagccacatgatcaccaccgctggcgaaagccccttcgagggcaccagttttgccgctccagttgtcagcgccacagctgcactgcttcgccagcattttccctttgccacaccctatgaaattcgtgcacgaatcttcaacagcatcgaccctgcaagaggcgctattgatccctacctggcacttactcaagaaatctatcccaccactcccctggttcatgagatcgcactaagtgttcccacgccgccggatgattctccacgggagcggggcatcctagttaccgcaatcattgttgggttgctcgcagtgttagctgtgctgatgggactacgccgaattcatcatcactcggcctttcaaaaagctagctcaagtgttatcacttaatctatgaggcaccgttcagaatcccat

SEQ ID NO: 176 - protein, 417 aa, Corynebacterium glutamicum
VDKMRRLIAVSLAALFMLASTPATRAQEVEALACPEVAIADPSSAVLDEHLSQSLSQAHQLATGAGVMVAVIDTGVSLHPRLPHLIPGGDFVGAHQSPDVPGELIDCDGHGTIVAGIIASQGNPGTGWPYDGSSDPYIGVAPDSGIISIKQTSSYVRTREDSNVGTLSTLAESIHRALDSGAHVINISVVSCLPQSPDEAASFQPLTDALNRAELQGVIVVAAAGNLGQDCPVGSTVYPAHSDTVLSVSARFDSHTLAEYSMPGNQQILSAPSHIQAGLSPRGDGFASHMITTAGESPFEGTSFAAPVVSATAALLRQHFPFATPYEIRARIFNSIDPARGAIDPYLALTQEIYPTTPLVHEIALSVPTPPDDSPRERGILVTAIIVGLLAVLAVLMGLRRIHHHSAFQKASSSVIT

SEQ ID NO: 177 - DNA, 1387 bp, Corynebacterium glutamicum
  CDS (101)..(1357): RXA01647
gcaaatctgagaatcttcccactttcactagtcttatcccggaccagcgcactacagttcctggattaggggatgtaaagatctaaagctgggggaatacatggctgaaggcatgttgatgcccacgacatcggcgcaggtgtcggggcataaatttctggtgcggcgcatcgaacatgggttggtgatgggcgatgtgcgcatgattcatgatccacttggtaggcgccggcgggcgttggtgtttggggtggtggcgtgcgtgatgttggcggtgggatcattggcgttggctatttttcgacccgcgaaggatccggccgatgcgccgttgatccgctctgaatccggcgcgctctttgtgcagctggatgggtcggtgcatccggtggctaatgtggcctcggctcggttgattgtgggggagccggtggatccggtgaacgccagcgatgcgatcatcgcgggcatgccgcgcggagtgccggtgggggttcctgatgcgccggggcttttcagcagcaccgaagaacccgagcaagattggtttgtgtgccaggatgtcggcactggggatctacacattacggttcctaggggcggactagggcccaccctgattgcggaaggaaatgggtggctgggggcgtcgaaaagcgaaaccggcgaggtcacctggaacctgattaccgcggacgggcgccgcgaactgccggcgtggggcagcgaacatgggcgcattatgcgccgccacctggggatttccgaggacaccccgcgcgtatacctgaccactgagctgctcaacgcgatccccgagcacgacgcggtccgcttcccagccccgctgcccgagcttgtcgacgcctccacccgcaactggttacggctcgacggggcgctcgccgaaatcacgccgctacagcgcgggttgcttatcgacgccggttccggtgttttccccgaccccaccgcgcttcttggtgtgcatgaagaaacagccaacaccttgacgctgcccgagcaaacagtttcttggcaagatctggacggtggttttgcctgcgcggatggtgaaggccagatcggtttcctggaaactctggaatcgggggtggcgctatctggtgattccagggcgaaaagtttcagcacaaacgctggtggggcagtgggcgtggacagtggctttggctactatgtggtctctgattttgggctgatgcaccctgtttctactggtgaatcgatggttgccctaggaatcactgacgtgcaggtcgtgccgtggagcgtgctgcgattgttgccgcagggaagtgaattagcaaaagagacagcgctcgcgcccacctattaaggagtatggtggccttacatgagcgga

SEQ ID NO: 178 - protein, 419 aa, Corynebacterium glutamicum
MAEGMLMPTTSAQVSGHKFLVRRIEHGLVMGDVRMIHDPLGRRRRALVFGVVACVMLAVGSLALAIFRPAKDPADAPLIRSESGALFVQLDGSVHPVANVASARLIVGEPVDPVNASDAIIAGMPRGVPVGVPDAPGLFSSTEEPEQDWFVCQDVGTGDLHITVPRGGLGPTLIAEGNGWLGASKSETGEVTWNLITADGRRELPAWGSEHGRIMRRHLGISEDTPRVYLTTELLNAIPEHDAVRFPAPLPELVDASTRNWLRLDGALAEITPLQRGLLIDAGSGVFPDPTALLGVHEETANTLTLPEQTVSWQDLDGGFACADGEGQIGFLETLESGVALSGDSRAKSFSTNAGGAVGVDSGFGYYVVSDFGLMHPVSTGESMVALGITDVQVVPWSVLRLLPQGSELAKETALAPTY

SEQ ID NO: 179 - DNA, 472 bp, Corynebacterium glutamicum
  CDS (101)..(442): RXA01672
agtagcaaagggtgcagtcgaaggaccagcatccaagactgctgccgaagaaaccgactccgttgacaacggatccgacgaaaacggcgaggaataatttatggcatcccgagaagtatccatcacccgaatctcaccactagcaaccttccgagttgcactggcaatgtccatcatcggactcgtggcgtggatcatctgcgtaaccgtcctctatttcggacttaacgtggctggcgtctggcagaacttcaacgatgtcatcggcggtgttggtgcagaacaaaccatcaccttcgggctcgtcctgagcatttccgcacttctgggagctatcggagcgattaccgtcgctgtgcttgcaccattgtgtgcaatcatctacaactcgattgttgacctcttcggtggactgcagattcaactgcaagaagaagtagactaacctctgaaacacaaacccctagacact

SEQ ID NO: 180 - protein, 114 aa, Corynebacterium glutamicum
MASREVSITRISPLATFRVALAMSIIGLVAWIICVTVLYFGLNVAGVWQNFNDVIGGVGAEQTITFGLVLSISALLGAIGAITVAVLAPLCAIIYNSIVDLFGGLQIQLQEEVD

SEQ ID NO: 181 - DNA, 874 bp, Corynebacterium glutamicum
  CDS (101)..(844): RXA01677
gtcgccatagttgagttttattcatggcttttagctaggcgactttagttgagggcttttagttgagggcttcccagcagggatggttaaggagaattcagtgaaccaacagagtaaaaagtggctcgtaccgacactggtcgtcatcattgcagtgctcctcatcgcagttgttctgttgatgtaccgaggaaatgcgagtgatacggccgagggcgtttcagccgctgcgacttcggactcggctgctgcttcgactgctgcttcgggttccgcttctggtgctgcggactccgatctgaccagcgtggaagcacgcgacccttccgaccctgttgcggtgggagacgttgatgcacctgttgggttagtggtgttttccgactaccaatgcccgttctgtgcaaagtggagcgatgaaaccctgccacagatgatgaagcatgtggaagatggaaacctccgcattgaatggcgtgaagtgaacatctttggagaaccatctgagcgtggagctcgcgcggcatacgctgcgggtttgcaggacgcatacttggaataccacaacgcactctttgccaacggtgaaaaacccagcgaagacctgctcagcgaagagggacttattaagcttgctggtgaccttggactagacgaatcgaaattcactgccgatttccaatcccctgaaactgcagtcgcaattgcgcaacatcaacagctgggaatcgatcttggcgcctactccaccccagctttcctcctaggtggccagccaatcatgggcgctcagcctgcttctgtatttgaagccgccttcgagcaagcactggcagcgaaagaataaaccgtggatgtcggcctagttacagct

SEQ ID NO: 182 - protein, 248 aa, Corynebacterium glutamicum
VNQQSKKWLVPTLVVIIAVLLIAVVLLMYRGNASDTAEGVSAAATSDSAAASTAASGSASGAADSDLTSVEARDPSDPVAVGDVDAPVGLVVFSDYQCPFCAKWSDETLPQMMKHVEDGNLRIEWREVNIFGEPSERGARAAYAAGLQDAYLEYHNALFANGEKPSEDLLSEEGLIKLAGDLGLDESKFTADFQSPETAVAIAQHQQLGIDLGAYSTPAFLLGGQPIMGAQPASVFEAAFEQALAAKE

SEQ ID NO: 183 - DNA, 1552 bp, Corynebacterium glutamicum
  CDS (101)..(1522): RXA01693
aggagactggctggattattggctggttttcttgggaaatcgtcatgggcattaatcctagtcccaacaattgccagaacccgaacactaggcttgaaccatgaatactgcacctttcaaactcgaagctgacttcgcatcagccctgcccaccatggcagccccctggcaaggtgaggaagcccccaaccctgagctcgtgattttaaatgacgacctcgcctacagcctcgggcttgatccgacatggcttcgcacacctgagggcgttcaatttcttctcggactcaaccccgagcccttaacaaaagcagttgcgcaggcctattccggccaccaattcggacagtttgtggcaagccttggtgatggccgagcgcttcttctcggcgaagcccgctcagctgacggcgtactgcatgatatccacctcaaaggatctggacgaacccaattctcccgaggagccgatggacgcgccgtccttggccccgtcttacgcgaatacatcatctccgaagcgatgcatgcacttggtgttcccaccaccaggtcacttgcagtaattagcaccggtaggaaaatccaacgaggaagcgtagccccaggcgcagtccttgttcgagtagcaaccagcctcattcgagtcggatccttccaatactccaacatctctggtggcatcgaactatctcaacacctggcgaactatacgatcaccaggcatttcccttcgttggtagctgaactatccgcaccaacccccgcaacttatgtatcactgtttaaagcgattcttcagcgccaagcagacaccgttggaaaatggaccaggctgggtttcgttcacggagccctcaacacagacaacacgttgatatccggagaaactgttgactacggcccatgcgctttcatggagcgctaccgtggcgacgcgaaatttagctccatcgacacttatggtcgctacaaatttgaaaaccaacctatgatcctcggatggaacatggcccgcctcgtagaaaccctcctcccactcctgggcgccacaccagacgaaggcatgacagcagcccaagaagctctcgtagaattcgatgacctctgcgaacaagcaatccgaaaagaattcgccactgcactgggccttgacgagtcagacaccggcacggtagagcagttccgtgaactgctctacctccataaccccgacatcaccacgctgctgcgcgcactcaccgacaacaccgcaccaccgagtggctttgaagcattcgttcacgactggaaaacccaagacccagatatcgaagcaatgcgagcagtaaatccacttttcattccacgcaatcacctcgtggaagctgctctcgcagacgcagttgaagggaatctagaaaagttccacgaactcctcgctgctgtcaccaatccttttgatccaactgcgggccccgatgaactacgcctgccaagcgaagaaggatttgaagaagactacatgaccttctgcggtacctaggacagatggtggggcagacgtcggggt

SEQ ID NO: 184 - protein, 474 aa, Corynebacterium glutamicum
MNTAPFKLEADFASALPTMAAPWQGEEAPNPELVILNDDLAYSLGLDPTWLRTPEGVQFLLGLNPEPLTKAVAQAYSGHQFGQFVASLGDGRALLLGEARSADGVLHDIHLKGSGRTQFSRGADGRAVLGPVLREYIISEAMHALGVPTTRSLAVISTGRKIQRGSVAPGAVLVRVATSLIRVGSFQYSNISGGIELSQHLANYTITRHFPSLVAELSAPTPATYVSLFKAILQRQADTVGKWTRLGFVHGALNTDNTLISGETVDYGPCAFMERYRGDAKFSSIDTYGRYKFENQPMILGWNMARLVETLLPLLGATPDEGMTAAQEALVEFDDLCEQAIRKEFATALGLDESDTGTVEQFRELLYLHNPDITTLLRALTDNTAPPSGFEAFVHDWKTQDPDIEAMRAVNPLFIPRNHLVEAALADAVEGNLEKFHELLAAVTNPFDPTAGPDELRLPSEEGFEEDYMTFCGT

SEQ ID NO: 185 - DNA, 928 bp, Corynebacterium glutamicum
  CDS (101)..(898): RXA01741
gcatctctggcttttcctgcatgacagatgattgtaactgtgatgaaataaggccagatgaagtaactgtgtcgattaagttttgggggaaatttttcagatgacacacatcgctttagccaactctgcccaagttctgatccgcccggattctgcgattcaattcggcatcgacgccacccgcgctggcgtcttaaatatcgatccatcgctgtcgtcgcgagtcgtcccggtgctgcggaatctgcggaccgcccgaccgatcgttgatgtcatcgccgacctcacgactgcaggcctcgcacccaccgctgcgagcagtttgctcgaggaccttttagaattcggtgtggtccgcgaatcggcggcggcgcaggtgttgctgttcggggacggttcgcttgtcgacgtcacctccttccttttggaaacctccggctttgttcccagaccccagatcatcgatgagtcgcctcgagagtttttcgagcttccctccagccacattttggttctcaacaagctcgcacattcccaacgtctatccccgctgcttcacaaatatgcgccgacgtatctgtgcgccgcgatcgtcgataatcgtggcatcatcggcccgggccggagatcacgatcggggccgtgtttgatgtgtgtggatctgcatcgctgcgatatcgatccgcattggctctctattatcaatcagcaacccaacggtcccacctttcctgatcccgtcacggagatggcgacggctgcccgactcgtcgcctgggtcactgccgatacatggttgcccggcgttgtggaggaagtaaacccccacgatcgaacaaactcggtacgcaccctccctgtgcatccaaaatgtccgatgtgttggagtttaggttcctaaagtgctcccaaaatcgcgagcacgtca

SEQ ID NO: 186 - protein, 266 aa, Corynebacterium glutamicum
MTHIALANSAQVLIRPDSAIQFGIDATRAGVLNIDPSLSSRVVPVLRNLRTARPIVDVIADLTTAGLAPTAASSLLEDLLEFGVVRESAAAQVLLFGDGSLVDVTSFLLETSGFVPRPQIIDESPREFFELPSSHILVLNKLAHSQRLSPLLHKYAPTYLCAAIVDNRGIIGPGRRSRSGPCLMCVDLHRCDIDPHWLSIINQQPNGPTFPDPVTEMATAARLVAWVTADTWLPGVVEEVNPHDRTNSVRTLPVHPKCPMCWSLGS

SEQ ID NO: 187 - DNA, 1747 bp, Corynebacterium glutamicum
  CDS (101)..(1717): RXA01749
ggtttttgcgtgctctggtttagggactggttttgggaacgtgcccagttccacatcaaataacgctgaggtcgtacttaatccatgagatcatgaatgggtgagcttccttgtagaaaatcaattactcgcgttggttgtcatcatgacggtcggactattgctcggccgcatcaaaattttcgggttccgtctcggcgtcgccgctgtactgtttgtaggtctagcgctatccaccattgagccggatatttccgtcccatccctcatttacgtggttggactgtcgctttttgtctacacgatcggtctggaagccggccctggattcttcacctccatgaaaaccactggtctgcgcaacaacgcactgaccttgggcgccatcatcgccaccacggcactcgcatgggcactcatcacagttttgaacatcgatgccgcctccggcgccggcatgctcaccggcgcgctcaccaacaccccagccatggccgcagttgttgacgcacttccttcgcttatcgacgacaccggccagcttcacctcatcgccgagctgcccgtcgtcgcatattccttggcataccccctcggtgtgctcatcgttattctctccatcgccatcttcagctctgtgttcaaagtcgaccacaacaaagaagccgaagaagcgggcgttgcggtccaggaactcaaaggccgtcgcatccgcgtcaccgtcgctgatcttccagccctggagaacatcccagagctgctcaacctccacgtcattgtgtcccgagtggaacgagacggtgagcaattcatcccgctttatggcgaacacgcacgcatcggcgatgtcttaacagtggtgggtgccgatgaagaactcaaccgcgcggaaaaagccatcggtgaactcattgacggcgacccctacagcaatgtggaacttgattaccgacgcatcttcgtctcaaacacagcagtcgtgggcactcccctatccaagctccagccactgtttaaagacatgctgatcacccgcatcaggcgcggcgacacagatttggtggcctcctccgacatgactttgcagctcggtgaccgtgtccgcgttgtcgcaccagcagaaaaactccgcgaagcaacccaattgctcggcgattcctacaagaaactctccgatttcaacctgctcccactcgctgccggcctcatgatcggtgtgcttgtcggcatggtggagttcccactaccaggtggaagctccctgaaactgggtaacgcaggtggaccgctagttgttgcgctgctgctcggcatgatcaatcgcacaggcaagttcgtctggcaaatcccctacggagcaaaccttgcccttcgccaactgggcatcacactatttttggctgccatcggtacctcagcgggcgcaggatttcgatcagcgatcagcgacccccaatcactcaccatcatcggcttcggtgcgctgctcactttgttcatctccatcacggtgctgttcgttggccacaaactgatgaaaatccccttcggtgaaaccgctggcatcctcgccggtacgcaaacccaccctgctgtgctgagttatgtgtcagatgcctcccgcaacgagctccctgccatgggttatacctctgtgtatccgctggcgatgatcgcaaagatcctggccgcccaaacgttgttgttcctacttatctagcattgaccccttaagcgcagaaggcga

SEQ ID NO: 188 - protein, 539 aa, Corynebacterium glutamicum
VSFLVENQLLALVVIMTVGLLLGRIKIFGFRLGVAAVLFVGLALSTIEPDISVPSLIYVVGLSLFVYTIGLEAGPGFFTSMKTTGLRNNALTLGAIIATTALAWALITVLNIDAASGAGMLTGALTNTPAMAAVVDALPSLIDDTGQLHLIAELPVVAYSLAYPLGVLIVILSIAIFSSVFKVDHNKEAEEAGVAVQELKGRRIRVTVADLPALENIPELLNLHVIVSRVERDGEQFIPLYGEHARIGDVLTVVGADEELNRAEKAIGELIDGDPYSNVELDYRRIFVSNTAVVGTPLSKLQPLFKDMLITRIRRGDTDLVASSDMTLQLGDRVRVVAPAEKLREATQLLGDSYKKLSDFNLLPLAAGLMIGVLVGMVEFPLPGGSSLKLGNAGGPLVVALLLGMINRTGKFVWQIPYGANLALRQLGITLFLAAIGTSAGAGFRSAISDPQSLTIIGFGALLTLFISITVLFVGHKLMKIPFGETAGILAGTQTHPAVLSYVSDASRNELPAMGYTSVYPLAMIAKILAAQTLLFLLI

SEQ ID NO: 189 - DNA, 2071 bp, Corynebacterium glutamicum
  CDS (101)..(2041): RXA01754
tgtggctgaagacaagaatgaatagcattcatctcgtcgaatttcatgtagaaatttgtcccccttttttttgatgtgaaagttgaatcggtaagctcctgtgaaaattaaatccgtatttttgagcaccgctttaagcgcttccttactgctcgggatcaccccacccgtgctgggagcaacgatcaaccccagtttgcctctttctgcgttgagctcctcggacgatatcgccgtacccaacttcgccaaagaattaccgttagcttttgatgtaccagcaggcactgttccccaaagcttgagtggaacgctgcagattcctgccgagttttctggcggcgtcgtggagttttatgacggtgaccggctctttcacaccctgcgcctagaagttaatgattcccgagcacacattgaggttccgctgcaaagcgttcctgtcgaagacggccgcgccaccttttggttgcgcgccatgttggatcctgtaaacaaccagtggtgctacgaggagcaggaagtccgcttcttagacggaaacgtcacctttgaaggggcgacgattaacccagctgtggtggctgattacttcccgtcagtgctgcgcgcgttgacaatttacgtcccggaaaacccctctgaggcagtacaagaagccacgttagaggttgcgacctccctggattcggtgtaccgaagatcaggtctggatgtcaacgtagaaacgcttccaaccggcaccgatgctcctcctacacgtcctcaagattttgaacgccagattgtgctggttgacgaggcaacagaaagtaacacgcaaaaaaccgaattggtcaatcccggccaagacaatgcattcttgcgcctgaacggcaacgccgacgagctttacgatcaagcgcgcttgcttaccgacgcaaccctgccacttgccgtagacaccgaagtaacggcctcaggttttggtgatgtgcccaacctttctacagatgtggccaccctccaagaactgggtatcacgcagctcacctctgaatcagttgcgcgcacaagcgtcaccttgggcattgaacgctcccgcctgcggacctactcgcagtccatggacctgcacataacgggaacctacaccccattgccaccccaaaatgcaggacagatcacgttctccattggtgacaccgtgttggactccttgaccaccgatgacactggcatcattgaccgtgagttcaacgttcctggagacttggtcaaccgctacacggcgatcgtcgtggaattcaccagcaccggcgacgttaattgtggggtcacccagcccgtaggcctcaacattgattccgacagccttgtcacctcccaacattcagatgttcctgtactcaacggcttccggtccctaccgcagtccttccaacctcgtgtggacgtggcgtttgctgatcccagcgtgcaggaactctcccgcgctgtcagcgtagtgttgggaattcaatctatgagctcccagcgcatccgcccacacctggttaactgggatgaagccgtagccagcgagcgcccaacaattttcattgatgctgcgggcgcaaagactgatcaagtgccaagctacctcgcccaacaaggccaaaccctagagatcaccagcaagaacgaccaaaatgcggacggcgaacaactcacccgatccctgcaaaccaacgctgcgcttgttgtcggttccattcaggccgtgtgggatgccgataagaagcgcacggtgattgtggcaagttcccaggacaaccccgccgatttggatgccttgatttcgtggatgggagaagaccgcgaacgctggagtgatctcaacggcgacctgattgtcaaagtccgagaccgcgaacctgtgcaattgaccaccgtggaagccccagatcagcctggtcgatcggccacagcctttattgcgatcggcgtcagccttgtggtcattgccctgattgtcgcagccgtggtgtcagtgtccaggcgttcgcaaaaaggatacaaatgatttcttctttacccagtagaacgcagg

SEQ ID NO: 190 - protein, 647 aa, Corynebacterium glutamicum
VKIKSVFLSTALSASLLLGITPPVLGATINPSLPLSALSSSDDIAVPNFAKELPLAFDVPAGTVPQSLSGTLQIPAEFSGGVVEFYDGDRLFHTLRLEVNDSRAHIEVPLQSVPVEDGRATFWLRAMLDPVNNQWCYEEQEVRFLDGNVTFEGATINPAVVADYFPSVLRALTIYVPENPSEAVQEATLEVATSLDSVYRRSGLDVNVETLPTGTDAPPTRPQDFERQIVLVDEATESNTQKTELVNPGQDNAFLRLNGNADELYDQARLLTDATLPLAVDTEVTASGFGDVPNLSTDVATLQELGITQLTSESVARTSVTLGIERSRLRTYSQSMDLHITGTYTPLPPQNAGQITFSIGDTVLDSLTTDDTGIIDREFNVPGDLVNRYTAIVVEFTSTGDVNCGVTQPVGLNIDSDSLVTSQHSDVPVLNGFRSLPQSFQPRVDVAFADPSVQELSRAVSVVLGIQSMSSQRIRPHLVNWDEAVASERPTIFIDAAGAKTDQVPSYLAQQGQTLEITSKNDQNADGEQLTRSLQTNAALVVGSIQAVWDADKKRTVIVASSQDNPADLDALISWMGEDRERWSDLNGDLIVKVRDREPVQLTTVEAPDQPGRSATAFIAIGVSLVVIALIVAAVVSVSRRSQKGYK

SEQ ID NO: 191 - DNA, 4594 bp, Corynebacterium glutamicum
  CDS (101)..(4564): RXA01761
ttaaagtttctatattccattctaaaataactttgaattggggattaatgaaactttttaagcaattgtttaaaacgaatattgagggggtggcgggcaagtgactgcgacagttttagaaccgcaacctgtacagcttagtgagcaggacgtagatgctgagattgcgcgcatggagcttaaacacaaccgacacaagacgtggcgacgccgaacgatggctgttgtcatgacgctcttgatctcagtgggtttgagctttggtgcgtttggtaacaaggaacgtgaagctaatgctttcgccagcgctattattgcccaggttgtcggtgctatgggcgaggttgcctttgaagcgatttgtcccagtgatggtgacaccgagatgcttcttaagtgcatcaccgagaacttaggtgaaatgcacattatcgagaagtgtctcgaagcagaagatgtcttgaagtgcttctacgatgcgaaaaacgaagagcaacgtaaagaacagaaccttgataaagcccctgattactccatgtaccgtatggcctctgcgatggcatcgttctatggcaatggtcgggcagctactgccggtgtagaggaaggcggaccgaacgagttcctcgattctgaggacgccggtcttaaggtgtgggagggcattctcagtaaggccgccaacggaggcaatgtccttggttatgctgacgcgaaacacaacgaggactctggttggttctttggtaatggtgttgccaacaacgagaaaacgtactcctatgattctctagctgatcatgcctttcaagggccttatcactttgcattatttggcgcgacactgagtggcttaggctttgatagctcaaaggcggaggattcgcagactgattttgctcagcgtaagggcatggggtacgcgatgatgatcgcgtacatcatctccggaggcattgatctggtttttaacactgtgctgaatatcttgagcaccataaacccatttagactgctcgttggaccagtatctcagaatactaacaagacattcactgagaatatggctggtgggcagaccacagaaggaacaccgtttgaaggaatgactgatttcttcgggttgatctataactggtcagtgactgtgggctggctcatcgttattcctgtctccattggtctgtttatgatgggtgcgttgatgtttcgacgcatggacaagggatcagcgtttaaaaaggttgttatccgcgtcgtgtacggtgtcgttggcctgccactgcttggtgtctcttataccggtgcgctggattccttcctcgacagcggtagttccacaagtgctggatcaaatgcgacaaagattgtgttgtccacctacgtggatttccaatcatgggcagaaaacacccgtatgcgtgttcctgacaaagtaacactggcgtggagtctggaggatcaggcgccaacagggcagtccatgcggatggtacgcaattcggcgttggaaattaatgctcaatcaaatgagagttttactacttttaagaatccaggttccatggatctaggctatagcatggactggatggaaaagatggcggatccagccaattctggcaccgatgggacctcatcaagttcggcgacgactattttccagggaaccatcgcgctactgagtcgttatatcgacaacgacagtatctcctctggcagtttcgaaacctctattcgaagtgcgatggaatctttgacctcgaaagagggaagtggcgaagctgttgccggtggtgatgtaatggcctgggttactggttacaacacagcctctggtcttaatgagatcactgctgctgaattagctgatgcgaacaatccattgcttgaggtcagcgactcagctggtctgcagggacgacctattgaccgcaatgcggtgtcatttaaatctggtgatgcgacagcgtcatgcaacaactcagtcgtgacaggttctcgtgctgtggtcggggactaccgaagtgactgcaatatgtcgcccttgacgatgtacaacttcctcaacacctcattccatccagctgatgcaagtgtcttttctacgtccacttctgcgtcaagctacacccgtgcatcgcatagcgcagtgagtcttatcggttctggtgccatgaactttgtgtactggttctctgcaatgtccctgatgggtagcttcatcgtgatcggtatcggttacgccggtgccatgctgtttaatacgattcgacgcacgctgtcgctcattggtgccgttccttttgctgcgatgggctttattgctggtgttgccaaggtcattgtgtacaccatcgctatgctcgtagaggttatcggaacgatcattttgtaccagctcattacccggttcttgatggctgtaccagcactctttgaacaacctttggctgattccttaagtagtaacgagagtgctgagctggttgccggtgctggtatggggctagtcggtatggcactagctacctcaggcaactgggcgattgccggcatggtgatcacagtggcctcatccatgggggtcatcatcttcacgattattgcgatgaaggtgcgcggatctttggtatcaggtgtcgatgaagccgtgaccagtgttattaaccgcttcttggatacacaggtctcttctgcaggtgctacctctggtgacggcatgatgcgtcgtgcagccgcaacgggtcttggtattggtgcgacacatatggtactcaaccgtgatggtgacggtggtggatctgattcaggctctggtggatcaggtggcggtagcgattcaggcttgggtgagaaggctgctggtctggcgaaggttgtcacaactgtggctggtgccggattagtcggtaagtatgctacggatgcgctcgataattatgcagatggcgttatcaacggcgacggtgatggtgcgttcgcagcaggtggtgacgctaccgttgatggcgactatgtagcagatggagatgcaattgcttctgctgatgctaacgctgattttgtagacggtgttgttgatggtgctggtcgcgcgtcatttagcaatgctgcgtatagctccgatggaaccactctcgacggtgagggtgcgagcgttgatgcacagggtaacccgcttcatgctgatggcacaccaatgagtgctgctgaagctgaaatgaagatggctggtctgagctcgtcaggaaccatgatggagaaatctggtgtgaaatcgagtggcattaccactgcagcggatgtcatggacgatcagtctctggcaagcagtgtcactgagtctggtctgtccaagattccagacacctatggtgcagatgtctcgggtgctgcgggcacagtcggaactaccggtgctgattacagtgcgaccgattcaagcgcaggtctgaacatgagcgaggctgcattgcagagtggcaccccaatgggcgctctcgctggtggatctgtgtcgagttccgatcaggccatgaatgacgcagctcttcagattgcagcgtctcagggtcttgcaccagcaggttccatagctggtatggagcaacttagtgctcaagccactgaagcacctgctggaaaggccggcaagcagcttggcgatctttctggctcagcgctcaatactcagctggcgtccatgggacagcaggtaggtgacagtgtgaacagcgcttatgctgcaggcggtatgggtggtgttgatgtggctggcaaggtcaccgaggcagcacagcacttgtctcaggttccaggtcagattcagaatgctgtgaccaatgcggatgctggttcctctggcgcaagctttggtcagatggcacagggggcagctggtattgccggtgtcgcaggtgtgatcggtgcagcgggcgcagcaagctctgcagcacaaggcgcaggtactgtccagggtgcgatgggtaatgctgcagctggtgcgggaatgatcaacaacgctgtttccggtggagctactggctcaacaggtgccgcacatgtggtcaatgcatcacatggaccagtggcgcctggtcaggctcactaccaagagtctggtcatgcacaagcatttgtgcagaacaaccaggccaacaccgcgcacacagcaaacacgcgtgcaccgtcatcagctcaaattatgggcgcgaacgttgctggctcactggcatcacaggctgtacgaggaatcggtcagcctggtcagatgggtgctaatgttcgcgacgcgatgggtggcagcggacgctctggtggccgtggtggagcaactcaaggcggtcgaggcgcacagcgcagcggtgtcagtgctaagaacggtatccgtgcacagcgaggtcagaagccttctgtgaccggccaggcgatgaatgcagcaatgcgttcagcagcggtaagcggtcgcatggcaaacatggacggcaacagtgtaggtggcactgaagcagatccacagcaggggagtggcgtaaccgagaagggtgataaaggcgttaaatagcgtgtaaaacacaatgaccgtggagag

SEQ ID NO: 192 - protein, 1488 aa, Corynebacterium glutamicum
VTATVLEPQPVQLSEQDVDAEIARMELKHNRHKTWRRRTMAVVMTLLISVGLSFGAFGNKEREANAFASAIIAQVVGAMGEVAFEAICPSDGDTEMLLKCITENLGEMHIIEKCLEAEDVLKCFYDAKNEEQRKEQNLDKAPDYSMYRMASAMASFYGNGRAATAGVEEGGPNEFLDSEDAGLKVWEGILSKAANGGNVLGYADAKHNEDSGWFFGNGVANNEKTYSYDSLADHAFQGPYHFALFGATLSGLGFDSSKAEDSQTDFAQRKGMGYAMMIAYIISGGIDLVFNTVLNILSTINPFRLLVGPVSQNTNKTFTENMAGGQTTEGTPFEGMTDFFGLIYNWSVTVGWLIVIPVSIGLFMMGALMFRRMDKGSAFKKVVIRVVYGVVGLPLLGVSYTGALDSFLDSGSSTSAGSNATKIVLSTYVDFQSWAENTRMRVPDKVTLAWSLEDQAPTGQSMRMVRNSALEINAQSNESFTTFKNPGSMDLGYSMDWMEKMADPANSGTDGTSSSSATTIFQGTIALLSRYIDNDSISSGSFETSIRSAMESLTSKEGSGEAVAGGDVMAWVTGYNTASGLNEITAAELADANNPLLEVSDSAGLQGRPIDRNAVSFKSGDATASCNNSVVTGSRAVVGDYRSDCNMSPLTMYNFLNTSFHPADASVFSTSTSASSYTRASHSAVSLIGSGAMNFVYWFSAMSLMGSFIVIGIGYAGAMLFNTIRRTLSLIGAVPFAAMGFIAGVAKVIVYTIAMLVEVIGTIILYQLITRFLMAVPALFEQPLADSLSSNESAELVAGAGMGLVGMALATSGNWAIAGMVITVASSMGVIIFTIIAMKVRGSLVSGVDEAVTSVINRFLDTQVSSAGATSGDGMMRRAAATGLGIGATHMVLNRDGDGGGSDSGSGGSGGGSDSGLGEKAAGLAKVVTTVAGAGLVGKYATDALDNYADGVINGDGDGAFAAGGDATVDGDYVADGDAIASADANADFVDGVVDGAGRASFSNAAYSSDGTTLDGEGASVDAQGNPLHADGTPMSAAEAEMKMAGLSSSGTMMEKSGVKSSGITTAADVMDDQSLASSVTESGLSKIPDTYGADVSGAAGTVGTTGADYSATDSSAGLNMSEAALQSGTPMGALAGGSVSSSDQAMNDAALQIAASQGLAPAGSIAGMEQLSAQATEAPAGKAGKQLGDLSGSALNTQLASMGQQVGDSVNSAYAAGGMGGVDVAGKVTEAAQHLSQVPGQIQNAVTNADAGSSGASFGQMAQGAAGIAGVAGVIGAAGAASSAAQGAGTVQGAMGNAAAGAGMINNAVSGGATGSTGAAHVVNASHGPVAPGQAHYQESGHAQAFVQNNQANTAHTANTRAPSSAQIMGANVAGSLASQAVRGIGQPGQMGANVRDAMGGSGRSGGRGGATQGGRGAQRSGVSAKNGIRAQRGQKPSVTGQAMNAAMRSAAVSGRMANMDGNSVGGTEADPQQGSGVTEKGDKGVK

SEQ ID NO: 193 - DNA, 3895 bp, Corynebacterium glutamicum
  CDS (101)..(3865): RXA01770
tgctcatgacaggtaattcaacgcgttaccctgctgcagcataaaagaacctgcctcaacacacctccactttttctacttttaagaaagccacattctcatgccaattatcattgataacctcaattctgacgacgactccaccatcggcactgccaccgaatacaaccctgacactgacgccgatttacttgatgctattaacgctgatgctgaccttgatggcgacgccaccatcagcactaacgcgacagaagaaggtgtagacgcagcagctgaaaaacctaagaaaaagcgtaaagcccctgctctgaagcctaaaggactcacggcaaagttcttccaccgtgatcttactggcgtaggtggtaggaccggtcgcctcaacaagaacgtacacccgaccaacccagatctgtcctaccagccagtctctgatgtctacaccccacaatcagcagatcacaagggtattaagacccgctacatccttacccatccaacccccgctgttgttctcagtgagtccatcagcaacgcgtttcatgtctctaccctgcgtcgcaacaataatgtcaacaactctgattcggaattggctgcctggccgtacctctaccaactcgatattccgcagctggaccagatgattaatgtcgctgacatctgtgattaccatttccacggatataacctgtgggtggattttaccccgcagactatcgctctacgatccggtaagacggtactcgatgacggtaccaccgcctctgataacaccactcatgtctattaccgcgtcaccgttcacgttattgccggtcaagatcatggatctactctgcttgatgaccagggcaaccaggtgcttgatagggatgataatcctatttctaccccaagtatcaagcgtattggcgctgtcactgatcttttcgatcacaatccttttggcttcgctagtgtaaactctttcgcatttgtcgatttctcatgggacccagccaccaccttggtcgatatgctcaacaaccttgattcatatctctctaatcacatcaatattgccagctccccaacccccattgccctcgatatggttgtgctcaatgaatggtctgaaaagtcctatcagctgtgcgaacgcgttgttgcacaggcaaagctcatcaacagcaacaagatcaccgcacatgtgagtgatgtcatcaagcaaaatgcccacaatatcttgtggtttaccgaacagatgaaccctggcaccaccaacctcagcgaggtacctatctccaagaagtctatgctgccgatgtctcgccagctacgtattttggagcactacgatgtaccactgaccgcgtactctgctcttttctggactgtcagcgccattaagaatgaatctatggtgcagtaccttgtgcgacagaatatgcagctcaccttgagctcaaatctggatgcactcaactccattgtctcccagctccctgtaccagataaggacgttgtggctgcttctggctaccagattcagccacacttctccacgcagcagcgtgaagcaatcaccactgataatcctctcgcgattattcaggccggtgctggtaccggtaaatccaccgtgattctggaacgcattgagtacttgtgcgctgcaggcaccaaccctgaagagattgctgtgctgtcttttactaatgctgccgccgataacatcacagcaaaaaatgacaaggtgacctctatgaccatctccaagatggttcatgagatttacgcacacaatttccctgatcatgagatctccaccatcgacaccattatcaatacgcttgatattgaatacggcgatcaaatggtgacctccgattacatgattcagctccgtgacctgctctataaggtcatgacgcagggtggcaacgccaacctgacagcgttgagcatcttcatggaatcccatatcgaggcgttcatctcggtgttggatcagatcaagcagacttctcttgagctggaaatcatcatctgctacctgctcttggataagctgatcgagcctcatgcatcgccgaagtacctcattattgatgaggtgcaggacaactcggtcttcgagttcgtctttgcacttcgttttgcggcaaagcacaatacgagtctgtacttggtgggtgactcgtcacagaccttgtatgagttccgttctgctaaccctaaggctctgaactccctggaagcatctggtgttttcggtacctaccgtttgaccaccaattaccgttccaaccaggaaattcttgacttcgctaatatccacctctcggatattgaagctaaccagttcgcaggtattcagctctacgccaactcttttgatgcacctactgcggacagcttcaaagaaaaggttgaactggacatgcaccatgtgtctaagcagtctgagtttaccgacagcattccttatttcatggagtccaataaagctcgctttgatgctgcgatcttgaacaatgagcaaaccattgtgcttgctcattctggtcgtgaaattcgtgcagcgcagcaagcgctagccgagatgtaccccagcatcacggtgcgtaacttgcagtccgataagggtttcaacaacacggtattttcgacctttattaaggatttctggtttgaggtcaccgctgtagacccagctcatgccgcatttacctttaccagccaagtcaccgctcatctagataagttggtacgcggaaagcgtgagcagatggaggatcgcgttatccggtctatggctgcatggtggcgtgaaaatgagcgtgacatccagggttgggtgcagcaaactcagtccggtgcgatcaccaacgaagagttcttctaccgtcttcgtcagtgcattcttgactatgaaatcaggaataaccgagcacgtcagtccatgctcaatgcgcgcaacaacgctaacaaggaggctgtcgcacaggagaaaccactgctcatggtctccaccattcacagtgcaaagggtctggaattcgataatgtcatcgtgcttcaaaaaccaagctccgatgcagagatgaccgaagaaggtaagcgcgcaacctatgtggcgctgacccgtgcaaaaaagcgtgaactcattattgctggttctactcgcgcatacccacgcatcgtcaccgattatgagcaaatcgttgatcttcttgaaaagcgcgatgaggagcgcaaaattaaggaggaagaggctgcagcactcgccacccttgaagctgaacaggagacgcgcgcccttgctgctgctgaggcgcaggctcaggcgttgttgcttgagcacaacccgtggttgcgtgatctcagcgatgaagaagtcactgctctaactgagcaagagatcatcaacaatgttgaggcagccctacagattgaagaagaggaggaagaggctcgtgcactcgctgcagcagagccagcaattcagcagtacttgtctcagtttgctttcgatgagttcccggacgacgacaatgtagccaacactgtcgtacatgtagcaccacagcctattctccaccaggcagtgcctgcagatgtgactgtacaatcaagcaccgcccccgtaacacctgttgttgcggatcttgaggtaaccactgttgcagctgatccagtcgaaccgactatcgttgctgcacagcctgaggtggacgacaaccttgtctacagcacgtccacccctaatagtcacagtgacgttattgcagtgaactctgatacctcagaaaacgctgctgttaatccagttctgtccgatattgaggcactccgagcaattttcaacaaccaggactaaaacacctgctgctgttgagcgcttctc

SEQ ID NO: 194 - protein, 1255 aa, Corynebacterium glutamicum
MPIIIDNLNSDDDSTIGTATEYNPDTDADLLDAINADADLDGDATISTNATEEGVDAAAEKPKKKRKAPALKPKGLTAKFFHRDLTGVGGRTGRLNKNVHPTNPDLSYQPVSDVYTPQSADHKGIKTRYILTHPTPAVVLSESISNAFHVSTLRRNNNVNNSDSELAAWPYLYQLDIPQLDQMINVADICDYHFHGYNLWVDFTPQTIALRSGKTVLDDGTTASDNTTHVYYRVTVHVIAGQDHGSTLLDDQGNQVLDRDDNPISTPSIKRIGAVTDLFDHNPFGFASVNSFAFVDFSWDPATTLVDMLNNLDSYLSNHINIASSPTPIALDMVVLNEWSEKSYQLCERVVAQAKLINSNKITAHVSDVIKQNAHNILWFTEQMNPGTTNLSEVPISKKSMLPMSRQLRILEHYDVPLTAYSALFWTVSAIKNESMVQYLVRQNMQLTLSSNLDALNSIVSQLPVPDKDVVAASGYQIQPHFSTQQREAITTDNPLAIIQAGAGTGKSTVILERIEYLCAAGTNPEEIAVLSFTNAAADNITAKNDKVTSMTISKMVHEIYAHNFPDHEISTIDTIINTLDIEYGDQMVTSDYMIQLRDLLYKVMTQGGNANLTALSIFMESHIEAFISVLDQIKQTSLELEIIICYLLLDKLIEPHASPKYLIIDEVQDNSVFEFVFALRFAAKHNTSLYLVGDSSQTLYEFRSANPKALNSLEASGVFGTYRLTTNYRSNQEILDFANIHLSDIEANQFAGIQLYANSFDAPTADSFKEKVELDMHHVSKQSEFTDSIPYFMESNKARFDAAILNNEQTIVLAHSGREIRAAQQALAEMYPSITVRNLQSDKGFNNTVFSTFIKDFWFEVTAVDPAHAAFTFTSQVTAHLDKLVRGKREQMEDRVIRSMAAWWRENERDIQGWVQQTQSGAITNEEFFYRLRQCILDYEIRNNRARQSMLNARNNANKEAVAQEKPLLMVSTIHSAKGLEFDNVIVLQKPSSDAEMTEEGKRATYVALTRAKKRELIIAGSTRAYPRIVTDYEQIVDLLEKRDEERKIKEEEAAALATLEAEQETRALAAAEAQAQALLLEHNPWLRDLSDEEVTALTEQEIINNVEAALQIEEEEEEARALAAAEPAIQQYLSQFAFDEFPDDDNVANTVVHVAPQPILHQAVPADVTVQSSTAPVTPVVADLEVTTVAADPVEPTIVAAQPEVDDNLVYSTSTPNSHSDVIAVNSDTSENAAVNPVLSDIEALRAIFNNQD

SEQ ID NO: 195 - DNA, 874 bp, Corynebacterium glutamicum
  CDS (101)..(844): RXA01771
ccggcccgatcctaaaactataagttttgggggacgcaccgctgccccgctgttggtggttccggagcggcgataatcgctaaacgtttgaggtgattgtatgggtattttcaggtcgcggtcgcaggattttgggtggagcatgcaccaggctggccagctcatcaatgatcccagtcagggtctgtggcgcacttctgccctgcgctcgccggttgctcgggttggacatgccgtgttgcgccagcgtgccggtgagatctcgcgcatgcaaggtcgtgagttttctcgccctggggatcagttccgacaggtagatttgcgcaggcgactgattcaggtccatccccaatcaattcctacagcggatgcgatggccgtaaccatcaccatggcgctcaccgctgccacgattgatccggtgaagttcgtcgcggattcacagaacccggatgaagagatttatttggcagctcagatcgcattgcgggaaatggttatcgctatgcctttggaggatttcatcggggtgcgcattgatctagagcctgttttggtggctgctcaagctgctgcgaagaatgtgggcgtggaagtctcgtcaatcttgctgaaggatctgaatcttccccaggagtactcgggagcgttgcaggaatcgatcgttgcgaaaattcaagccgaaactgatctggaacgtgcacgaaatgaagtgaaaactacccgtgctcgacttgccagcgcgaaagtgttggagcaaaatccgattcttgccaaaattcggatgattgaagcgctcccaccgggatccacaattgaggttcgggagggtgactcaaaggcataaagttgcccatttcggtgccctccacgg

SEQ ID NO: 196 - protein, 248 aa, Corynebacterium glutamicum
MGIFRSRSQDFGWSMHQAGQLINDPSQGLWRTSALRSPVARVGHAVLRQRAGEISRMQGREFSRPGDQFRQVDLRRRLIQVHPQSIPTADAMAVTITMALTAATIDPVKFVADSQNPDEEIYLAAQIALREMVIAMPLEDFIGVRIDLEPVLVAAQAAAKNVGVEVSSILLKDLNLPQEYSGALQESIVAKIQAETDLERARNEVKTTRARLASAKVLEQNPILAKIRMIEALPPGSTIEVREGDSKA

SEQ ID NO: 197 - DNA, 1582 bp, Corynebacterium glutamicum
  CDS (101)..(1552): RXA01776
cgtataaccacacacgccacagatactcagctatctgtggcgtgttgttttacatcaacctctcacccatcccccatcactattaaagaaaatcaccatcatgacccacactgataccccagcccctgcacacggcgtaacaccgagtgaattcgctgttacctcacacgaactcaccacctcaccaacacctagtccgacacaggtcgctattgcagcccaggaaaaaattcgccagcgcaagctcgaagagcttaaagcaaaaaagcgcacagacacgacagctcaaccacttctacctgcacctgtgctgcatacacgcccactcccctcaccgaatccaccgcgaccatctccaccggcacctaccactggacactgggaacttcttattgtcaggtcacagcagaagaaaatgaccgcagccaatccctttctcaaattccttcatctcggtaaagccttcaacgtgaaagacctagggctcacctgcgatcgcaccactgatgttgacctctcacggctaggcaagctcaatccgcccagctcacttatccttgaactagcaacggcacttgacctgcatccattcctctcagtcgcactctcttcgcacagtgcggtcaacgcccgtcgcaaccaacttgaattaaccctgcacaaccatgacactcagggcacagcattaggtcacagcgttactatggtccagctacccgaggtcattaatcgagctgctgtagagccctatatcaaacccaagggctcgggcaatgacccgcttgaccaaagcctgaaccaccgcgcacccaccgtaagtgacgtgcaaaaagcccttgtgcaggaaaacacaggcacggcaacagacagcaacaactacctgcttccttttgatcctgattctggtgcaccaaaaaccaccgcgcttaatgcgcctaataaggatctcctacaggccaggcatgagcttgcctatattcccgagatccccgccattgcatcgtggctcgatcaccttgaccccatcatgcgtgtgcaccgtagtcttgcgctttcaattttcccagtgcagcttctacgtgctgccgttgagaatctccctcataacgtaaccgatctgcataatcaccttgatcctgaggatctgctccctgaggaactcaccacctggctcgatcacctcttcgatgcagacttaaccgctctcgcttcatgcccacagcttgcaccacctatcgtgcgcagccacaatcacgccaaagcgatcgcagctatcaccgtgacctctgtcatggacgctctcatcgccaaaactcttgatgcgcatgacgatccactgccctcactaccggagtttgtagaactactgcgtgacgctgtagcccagctcgcagcgcattttaagcagcagcgcggcgaggtactaccgcagcccaatggcttgcgatacgccaccgactttggcctgctctcttatattgccgatggcttacatgaatatgcacttgccatcgacttcgggctgatctacccgaatgaactcatcaccgagtaaacccactcctagaaaggtctttaccca

SEQ ID NO: 198 - protein, 484 aa, Corynebacterium glutamicum
MTHTDTPAPAHGVTPSEFAVTSHELTTSPTPSPTQVAIAAQEKIRQRKLEELKAKKRTDTTAQPLLPAPVLHTRPLPSPNPPRPSPPAPTTGHWELLIVRSQQKKMTAANPFLKFLHLGKAFNVKDLGLTCDRTTDVDLSRLGKLNPPSSLILELATALDLHPFLSVALSSHSAVNARRNQLELTLHNHDTQGTALGHSVTMVQLPEVINRAAVEPYIKPKGSGNDPLDQSLNHRAPTVSDVQKALVQENTGTATDSNNYLLPFDPDSGAPKTTALNAPNKDLLQARHELAYIPEIPAIASWLDHLDPIMRVHRSLALSIFPVQLLRAAVENLPHNVTDLHNHLDPEDLLPEELTTWLDHLFDADLTALASCPQLAPPIVRSHNHAKAIAAITVTSVMDALIAKTLDAHDDPLPSLPEFVELLRDAVAQLAAHFKQQRGEVLPQPNGLRYATDFGLLSYIADGLHEYALAIDFGLIYPNELITE

SEQ ID NO: 199 - DNA, 1267 bp, Corynebacterium glutamicum
  CDS (101)..(1237): RXA01778
ctactaccccctccgggtgtggggtagctgtaacaactaccccacaatctcagccggtcttccatacataactgcgaaattggttagagtctttttcatgatgctctaccaacacaccacacgcgggctgatcattagtgacgcgatcatcgcgaaaatcagccaagtcaaccaactgctgctactaagacccacgctgttgcaagacaaagatatgcaccatgcgacattgagtagcgacaccccatcaattcgcagtcgccgtcgctcctatcgcgagaataaagccgcctatgcgaccacgagcaccatcagaaaccgtgagacctttttcagcacatctgatattgatttcgccatactcatgattcaggacgtacaagaatctctcgtatcttttgaccccaccttggctcaagatatgaagccaagaaccaacgcagtcatttctgcactcaatgagctacgcgagccactggataccttctaccgtgcccatgaatacggtgacatcatcagcgatggtgcttatgagttcgatcatgctgccattgatgcacaacacagccttagtgaactcgttgccggtctgcataattatgacaacctcatgtttccccaggaaaccgctccgttgatgagtgaatccaatggcattcagctggctcagtactataagtccaccaaactcgatgagtcacaattgacggtggaacctaatgagcctggtatcagcattatgtggcacgcccatgatttcacctggtcttgcctagtgcgctatgacgacatgaaccgttaccctgagcatttcagcatttcttttaaagacatgctgatccctgaacagatctatactttccacttcaccccacgtgaggcaatgcaactgcgcaaggtactttttaatgccatcgctgcctacaagtctcagacatggggtgatgagaacactgatctcaccaaggctgaactcgaatttggtggcacctccatgaccttccgcgccggcctctcacagcttagcgtcaccggacctcctgatcaccgccaggtgttctgcttgtcgtcttctggtcgtgaggatcacaacaccccgccaaacatgcgagacggacatgtcattgatattgcggttactcaattgtccaccctgcgtaacctcattcgggtactgtgcaccactcacccggatcattcaccagcactgctaccttatggtcagcagtacaccatctaacatgctctaactcgaccccgaaacacc

SEQ ID NO: 200 - protein, 379 aa, Corynebacterium glutamicum
MLYQHTTRGLIISDAIIAKISQVNQLLLLRPTLLQDKDMHHATLSSDTPSIRSRRRSYRENKAAYATTSTIRNRETFFSTSDIDFAILMIQDVQESLVSFDPTLAQDMKPRTNAVISALNELREPLDTFYRAHEYGDIISDGAYEFDHAAIDAQHSLSELVAGLHNYDNLMFPQETAPLMSESNGIQLAQYYKSTKLDESQLTVEPNEPGISIMWHAHDFTWSCLVRYDDMNRYPEHFSISFKDMLIPEQIYTFHFTPREAMQLRKVLFNAIAAYKSQTWGDENTDLTKAELEFGGTSMTFRAGLSQLSVTGPPDHRQVFCLSSSGREDHNTPPNMRDGHVIDIAVTQLSTLRNLIRVLCTTHPDHSPALLPYGQQYTI

SEQ ID NO: 201 - DNA, 1549 bp, Corynebacterium glutamicum
  CDS (101)..(1519): RXA01779
ttagtatttagtcaattagccaactacgataaaactagtgaataaacatactagttcactttgtcgcgcttaaaatactagaaagtaatataaaaaactcatgcgttatactccccgtacccaccgcgcactcggacttgctgcacttaccgctacagctctcctactgagctcatgctcgaccaccgctgaccttctcggcgccgattctgtggcgcaggctgtcaccgatggtggctctgcccttgatcccactgcagctcatgtgctcaccatcaccaatgccactgcaatgactcttgctgagctaccagaaaacaccgaccctgacgcagccaataacacggagccaacaatggcccaaagcgccctcaagcgtatttacggtctcgaaattgccgccgatggcactctgattgctgtcgcagcgccattaacctcgcgaaatagtggttctgagcagcctactgtcgcagcaatggctgatccagaaaacaatgctgaactcaccacagcacatattcttgagatcgacccagccacaggaactgccacaccacgtcaagatattgctctgactgaagattttcagaccatggctagctcttttagccagatccgtaatggctggggtactacccaactcatcggacaacaccctgatgatcccaagcaacctattcgttcagctgatacctggactgtcaccggctccactcagatcaccggctttaacaccaacaccccaacgggaaccgaagatgctgcctacaccatgccggcgactgagccagctgtgggactgtgcgctctagaatcaggctccgatgcaccactggatgaacaccgtgagctcagcaccagtgcattgcgtaccgcatcagtattgtcgagctctggatctgccaccctcaagctgcatgatcctatggtcatgtctgctactggcattgtccaagcacgcgcctatgtcgatggcgaagtcattaaccagcacgagattggcgatctccgcgagcagctcggtatcaacatcgaagaatctgaggctgctcaagcagaatcggatgcccaagcagccaccgatcacccacttgcagccctgggcttaagcaaccccaccagctcagcgttggttccaggtcttgctgagcttgattgtctcagtgctgaccaggctgccacctggcataaccgcgacaccagcattggcaccggtaagcccagcgtgcttgctgtcatcaacgcggaaatggccgatgactttaccctgcagctgttgagctcaggtgccaccactgccgaaacgcagcttgcccagctgccggatgaaaccgcgttcgtgctcattgacccatcatctggtgctgttactgacctgttctttatccaaagtctcaacactgatctgccggcaccaacaacccagattaattctattgctgttgatgagcgcgaccccaacatcatctacgccacttttagcggcgatgaccacctgtaccaaatgatgctgggttagttacacaactaactaaccaggcaccaa

SEQ ID NO: 202 - protein, 473 aa, Corynebacterium glutamicum
MRYTPRTHRALGLAALTATALLLSSCSTTADLLGADSVAQAVTDGGSALDPTAAHVLTITNATAMTLAELPENTDPDAANNTEPTMAQSALKRIYGLEIAADGTLIAVAAPLTSRNSGSEQPTVAAMADPENNAELTTAHILEIDPATGTATPRQDIALTEDFQTMASSFSQIRNGWGTTQLIGQHPDDPKQPIRSADTWTVTGSTQITGFNTNTPTGTEDAAYTMPATEPAVGLCALESGSDAPLDEHRELSTSALRTASVLSSSGSATLKLHDPMVMSATGIVQARAYVDGEVINQHEIGDLREQLGINIEESEAAQAESDAQAATDHPLAALGLSNPTSSALVPGLAELDCLSADQAATWHNRDTSIGTGKPSVLAVINAEMADDFTLQLLSSGATTAETQLAQLPDETAFVLIDPSSGAVTDLFFIQSLNTDLPAPTTQINSIAVDERDPNIIYATFSGDDHLYQMMLG

SEQ ID NO: 203 - DNA, 772 bp, Corynebacterium glutamicum
  CDS (101)..(742): RXA01789
tgcatcccaacaccacaacaccgcccctagtgccataaatgctaggggtgtttttttcatacccacaacaccgttcttctctagaaagagactcgatactatgcctcataaccccatcgaacttcacactaatgatgtactcgatgctctcgacattgacgccatctgcgacgatgtgtttctctacaccgacttcgagcacaccccaggtcagcttgatcgcttcgagcaactcgccttcacaaaaatctacgacatgctggaaacagctgctgaaaaattcccagatgtagcaattaatgacactttaagcactggcaaccacgctgctgaacagtactttcttgccaatcccggcaacatcatcgtgctgaccagcttcgcgctcaatcagaccgatctccgcgacctcataatctcaccgtgcattaagtacacagcacatgcacgagcactcatgcgtgcggtgacacgaacattgtgcactgcaaacaaccctgtagaacgcgcgactatcttccctgtgtctgtcgctaatgccttaagcatcgaagcgctgtgttccgaatatcatgcgttccgcaccaagcaggtgctcaacactgctgcactcatcaatcctgataacactcttatacccatgttgttgagcaaagcgtatgaggcatacgcctggcacaagggtgtcgaatccgcgcaacgaggtagcaacctagctcgtgagtactacgcaggacttatctgaaaattcactactcaactctggccccaa

SEQ ID NO: 204 - protein, 214 aa, Corynebacterium glutamicum
MPHNPIELHTNDVLDALDIDAICDDVFLYTDFEHTPGQLDRFEQLAFTKIYDMLETAAEKFPDVAINDTLSTGNHAAEQYFLANPGNIIVLTSFALNQTDLRDLIISPCIKYTAHARALMRAVTRTLCTANNPVERATIFPVSVANALSIEALCSEYHAFRTKQVLNTAALINPDNTLIPMLLSKAYEAYAWHKGVESAQRGSNLAREYYAGLI

SEQ ID NO: 205 - DNA, 493 bp, Corynebacterium glutamicum
  CDS (101)..(463): RXA01791
ccgcctgtgcaactaaccctgttgtgcaggcggttttctctatctacaccaacaactccacaacactatccggtccaaatctagaaaagagacaacccccatgacctcccccaccacgttaaagccctggtctattcgcggacccatcgacggtgaatacaccatgcttgaggcatatccgtttcagtatgtagcaaatactcgcccggccatcatgctctacgcactcgatgaaaacggtgtaccggaacaatatgccgacctcaccatcaaccttgccgatgtggagctcaagcaacttaaccacgtcatcattaacccagatctgcacgctgatgttaccgaactgtgcattagcgccggcctgctgcgacctggtgttctgggccagcaccaagtcggtagcaccaccgccaaggtctaccgactcactgagcgtgctgatggctggctacagctgttttagcagctacctgcgcctaatccccccacc

SEQ ID NO: 206 - protein, 121 aa, Corynebacterium glutamicum
MTSPTTLKPWSIRGPIDGEYTMLEAYPFQYVANTRPAIMLYALDENGVPEQYADLTINLADVELKQLNHVIINPDLHADVTELCISAGLLRPGVLGQHQVGSTTAKVYRLTERADGWLQLF

SEQ ID NO: 207 - DNA, 1306 bp, Corynebacterium glutamicum
  CDS (101)..(1276): RXA01809
acaacacgacagttgtaactagtggtttcaacaccattatcggtatgactcgtggcgactcgtatctctctgatgatctcgatgacctgggttaaacccgatgaacgagcaggaacgagaagccttagaggatgctgcccttgaggaagctgccttagccgatgaattagctgcattagaggctgaagctggcgtacaagggtcagtcgagccttatgactatgcagcagaccttgatgatgaggacgagtttgatgaggacccttttgctcaggatgaaccccgtgacgctggtccgctaggtgagttgagcagtgataaccatgtctctgaggctgttgctgaagacactgggacaagtacagaagagtctgcacaagagggcagtcacgaagagtcggtagacaatccccgtgatttcaccggcactgcgacagcggtgcgatcttttcgacccagacttcccgtacccaatgcactgcgaccaggaccacccatccgaacacaaccggcagtgaacaccgacatagatgatggcgggcaagagaatacagctggcgcgactgccgcagatgtgggggcgggagtgttttttggtacgcattttgagctggcttttgggcaggttgatgttcaccgccacataaggcatgagcaggctatgcgagatggacaccaggatctcagcgtctttgtcggtgctgatggggcgatcatgctggaagaacttaaaaatcgttaccagcgcccaccggagaacgagccccatgatgatgatgtcaccgaaatgataaagaccaccgaggaaacagagaaggagaacgtagagatggatcaggatatagctgtagtagacaacgttgatgaacaggttgtggtgacacctgctcatgacgctgacagcgtagcggttgttgctgaacaggtcgttgcgtcagaaccaacgccagagccggtacccaaggttgagcacgtagagatgagtgtcgatctagcgggtgagactattacaccgattgatcaggcaattcggtcttttatgcagctcaacggtattgagcacagcgtggtgttgcgacgcttggggctgatgactcaggtggcacataataaggaacttgatgaggtctacgctaaggcacttgccgagggtgaatcccatgctcagcagcagcatgaattagaagcagaaaatgaacggcttaaaaaagaagttgatgcgctcgctgcagagcttagtgctgcgttgatgggcgagggtggtggtgatcatgactaaggccgtgacaccaattgtggtgaccga

SEQ ID NO: 208 - protein, 392 aa, Corynebacterium glutamicum
MNEQEREALEDAALEEAALADELAALEAEAGVQGSVEPYDYAADLDDEDEFDEDPFAQDEPRDAGPLGELSSDNHVSEAVAEDTGTSTEESAQEGSHEESVDNPRDFTGTATAVRSFRPRLPVPNALRPGPPIRTQPAVNTDIDDGGQENTAGATAADVGAGVFFGTHFELAFGQVDVHRHIRHEQAMRDGHQDLSVFVGADGAIMLEELKNRYQRPPENEPHDDDVTEMIKTTEETEKENVEMDQDIAVVDNVDEQVVVTPAHDADSVAVVAEQVVASEPTPEPVPKVEHVEMSVDLAGETITPIDQAIRSFMQLNGIEHSVVLRRLGLMTQVAHNKELDEVYAKALAEGESHAQQQHELEAENERLKKEVDALAAELSAALMGEGGGDHD

SEQ ID NO: 209 - DNA, 400 bp, Corynebacterium glutamicum
  CDS (101)..(370): RXA01825
gtcaaggtagctggcccggcaactgatacgttaagctcaaacaagataagtaccagttgctggggtttttccaagacaataaattatgaaggtgtgaacaatgccaaaggcaagagtaactaaaaacgagaccgcaccggtttcaagcaacccaagcgcaaaccgcaccccggttaagatcaattccgccggaaccccaatgtggtacaaggtcatcatgtttgccttcatgatcgtcggcctagcctggttgatcattaactacctcgtgggcccacagatcccattcatggctgatcttggtgcatggaactatggcatcggcttcggtctgatgatcatcggcctactcatgaccatgggttggcgttaatccttcaaaaaagtgactgccgcagca

SEQ ID NO: 210 - protein, 90 aa, Corynebacterium glutamicum
MPKARVTKNETAPVSSNPSANRTPVKINSAGTPMWYKVIMFAFMIVGLAWLIINYLVGPQIPFMADLGAWNYGIGFGLMIIGLLMTMGWR

SEQ ID NO: 211 - DNA, 1114 bp, Corynebacterium glutamicum
  CDS (101)..(1084): RXA01842
ggcctgcgcgatagatcccccaatgtcggtggggtccttcgtgatcacttctttcactctttgatccacgtcatggtctcgcggtgatcatcttcctaccgtgacaggcaaggccgcaaacggccgtgaccacaggaaagaaattcacgaggagaggaagcacacgatgtcgaaggtatacgtgtccaacgagtacggcggcccggaaaaccaggaactgatcacccgcaacaccccccagccaggcccgggagaactcggggtcaaggtccacgcggccggggtcaacccgcttgattggaaggtccgttccggggttgccggaaccccgcgagagcttccggcacccctgggcgaggaggcctccgggatcgtcaccgccgttggagacggtgtggagggcttcgcggccggggatccggtgctcggcctggtggcccccggcgtcggcggatatgccgaggacaccctgctggtggcagagagtaccgtgctaaagccggaggagatctcgttcaccgacgccgccgcgatcccggtcgctggggcgagcgcctacgccggcactcaccaggtcgagcttgaaccaggccagtcgttgctgatcaatggggccggtggtggggtcgggctgatggccgcgcagatcggacgggtccacaagttccaggtcgtcggcgttgaccacgaggacaagcgcgagctcatcgaatccaccggtgctatcttcgtcgccaccggcgacgccgtcgcggagcaggtgcgtgcgctgctccctgacggtgtggacgtagtcttcgacctagtcggcggggaggcgttgcgggtggttgctcccttagcgaagaatccggcgcacgtgatctcggcggctgatgctgccaccgtgggagaactcggtggacaggtgctgcgccgcaccccggaaatggtcggacagatcaccggggtggtccagtacgggctggtcgacccgaaggtcgatacgacctacccgctggaacaggccggtaaggccctggcccacgttgagcagggccacgcccgcggcaagatcgtcctcgagctcatcacctcccaggactaaccagacaacgcggtgacctccctcagg

SEQ ID NO: 212 - protein, 328 aa, Corynebacterium glutamicum
VTGKAANGRDHRKEIHEERKHTMSKVYVSNEYGGPENQELITRNTPQPGPGELGVKVHAAGVNPLDWKVRSGVAGTPRELPAPLGEEASGIVTAVGDGVEGFAAGDPVLGLVAPGVGGYAEDTLLVAESTVLKPEEISFTDAAAIPVAGASAYAGTHQVELEPGQSLLINGAGGGVGLMAAQIGRVHKFQVVGVDHEDKRELIESTGAIFVATGDAVAEQVRALLPDGVDVVFDLVGGEALRVVAPLAKNPAHVISAADAATVGELGGQVLRRTPEMVGQITGVVQYGLVDPKVDTTYPLEQAGKALAHVEQGHARGKIVLELITSQD

SEQ ID NO: 213 - DNA, 916 bp, Corynebacterium glutamicum
  CDS (101)..(886): RXA01899
cctcgcagcacttcgcgcaggcgaatccacagtggccgcaaccttgatcaaagaacacatcgaaggctactacgaagaaaccgctgccgccgaggcctaaatgtcccgcactctgtgggcggtttcagatctacacgtcaccttcgcccaaaaccaaaacaccgttgatgccctcatgccgcaggaccccggcgactggctgatcgtcgctggcgatgtagcagagaaaatccccgatgtggtacgtaccttatccgcgctggtcaaacgctttgacaccgtgatttgggtgccgggcaaccacgaactcttcaaccggaaaacagaccgcgtcaacggcaaagcccgctaccgagcattagtcggacaactccgagccatcggcgtgatcacccccgaagatccctatccgatctttggtggcgtcaccatctgcccacttttcacactttacgattactctttccgtcccctcggcctcaccgcgaaacaagccctcgcccaagcaaaaataaagctagacgacgaactagccatcgccccctacgtagacatccccgcctggtgcgccgaacgagtcacctacacagaagaccgcctaaaagccaccaaaggcccaaaagtcctggtcaatcactggccgctggtcattgagcccacccaccggctcttccaaaaagacatcgcgctgtggtgtggaaccaccgccaccagggattgggccgtacgattcaacgctctcatggccattcacggtcacctacatattcctgccgaaacccgcgttgatggggtaagccacgtggaggtttctttgggttacccctttgaaaaacacccacctcacatgaagcgtccgtggccgtttccggtcatgcagattaactaactctgttgcttaaatgggggtaattgg

SEQ ID NO: 214 - protein, 262 aa, Corynebacterium glutamicum
MSRTLWAVSDLHVTFAQNQNTVDALMPQDPGDWLIVAGDVAEKIPDVVRTLSALVKRFDTVIWVPGNHELFNRKTDRVNGKARYRALVGQLRAIGVITPEDPYPIFGGVTICPLFTLYDYSFRPLGLTAKQALAQAKIKLDDELAIAPYVDIPAWCAERVTYTEDRLKATKGPKVLVNHWPLVIEPTHRLFQKDIALWCGTTATRDWAVRFNALMAIHGHLHIPAETRVDGVSHVEVSLGYPFEKHPPHMKRPWPFPVMQIN

SEQ ID NO: 215 - DNA, 661 bp, Corynebacterium glutamicum
  CDS (101)..(631): RXA01905
aaatgaaagtcacaaactttgttggggtttctttaaagtaaaatacagaagtttctctggcaaaaaacctcactactttctacagaaaggcgtcttcctcatgaaggcttctcagaccctcacccgcaacactcgtgcacgcaagctcggcatgggtattctcgcagcaactattatggctaccggtgcacttgctggcactgctccacaggcgacagcagcagtagataccactgcgccatacgtgtcctatgtcgttgacattcctggcaaggttggtgaaccaatcaagcctcagtacctcaccatctccgatcagtccgcctacaccgtgaccttcaagtacatgccatcctggttgaagtacgacgcaaacaagaagatgctgtacggtaccccaaccgaggttgatgtctggactcctgaggtacatgttgttgatgctcatggcaacaagactgtccgttacttcaccgttgtagcagtcccagcaaacactgcaccaaccaccaccacgccatctactccaaagccatctaccccgcaggtgaccaccccaactactccgaaggcgcctaccttgccaaagtccaccttcgactggaccttgtggggctccatctttggtttctagttctcactagcacctcaaaaagcacca

SEQ ID NO: 216 - protein, 177 aa, Corynebacterium glutamicum
MKASQTLTRNTRARKLGMGILAATIMATGALAGTAPQATAAVDTTAPYVSYVVDIPGKVGEPIKPQYLTISDQSAYTVTFKYMPSWLKYDANKKMLYGTPTEVDVWTPEVHVVDAHGNKTVRYFTVVAVPANTAPTTTTPSTPKPSTPQVTTPTTPKAPTLPKSTFDWTLWGSIFGF

SEQ ID NO: 217 - DNA, 976 bp, Corynebacterium glutamicum
  CDS (101)..(946): RXA01910
accgttttaaaaggcgcaatacaccacaccccaacaaactttttgattgttggggtgtttgtctcagatcatgaacagcacaatgtaggagaagattgatatggcatttccgcttctagcggttgctggcacagttgcccccgttgcagcaggatgggcaaaagataagtttctcagcaactctcagaataatcagcaggcccagaatcagcagatgagttttggacaggtcaacaacagcgcacagaattctggatcagaaaacagcggtttcatgggtcaatacggcaatctgggtgcaggtttggcaggtgctgctacaggcgcagggcttgcgtatagcgattttgaagatggtcaaagtttgtcctcgaaggcccgcaacatggtcggcaaagggctcgctggtgccggagctggtgtgttcaccaagcttgccaatgatgcaattcaggccgagggtggctcgatgaaggctagtgcttattctgccattgcaggcggcttgggatcgtatctcaaagacggcggtccgggtgtgattaaatccgcgatggccagcggtgcagccggttttggtgcggataaagtgcacgataaattagctgagtctggtcatgaggggttggctgattccttgtcgggcgctattcaaggaggtggtcttggttactccacgcttggcggtgtcactggtgctggtattggcggtgcgacgggcggtctcgcaggactagcacaaaactactttggtggtggcgatgactacagcaacgctggggcatctgcatcggggtttagtgccaaccaggttaatagtgagatcagcaccgagattccgcagtttgcgaatcttggtcaaccacagcgatccgagcttgaacaattagcgctacctcaagaatcacggtctgtagataagagctacgaccaaggctacgaagcgtaagcgctttataacaaccccgttttcagc

SEQ ID NO: 218 - protein, 282 aa, Corynebacterium glutamicum
MAFPLLAVAGTVAPVAAGWAKDKFLSNSQNNQQAQNQQMSFGQVNNSAQNSGSENSGFMGQYGNLGAGLAGAATGAGLAYSDFEDGQSLSSKARNMVGKGLAGAGAGVFTKLANDAIQAEGGSMKASAYSAIAGGLGSYLKDGGPGVIKSAMASGAAGFGADKVHDKLAESGHEGLADSLSGAIQGGGLGYSTLGGVTGAGIGGATGGLAGLAQNYFGGGDDYSNAGASASGFSANQVNSEISTEIPQFANLGQPQRSELEQLALPQESRSVDKSYDQGYEA

SEQ ID NO: 219 - DNA, 4432 bp, Corynebacterium glutamicum
  CDS (101)..(4402): RXA01945
attggatctaggaaaaattatgaacatctcaaagctcggactgaggatcgcggtcacagcaacggcgaccacaacggcgcttgccctcggtggcacgcacatggcagttggtcaagaaactgatctgctcaacgctatggaaacactcgctggggttccctcagacttggtggtcactgaaatcctccccgataccaccagctatgacaattttgaattctttgaagttcacaacaccggcagtgcacccgtgaccattggggaaggggagtacaccttcgcctattcctttgacgattccgccgatacgtcccgcgacaaggcactggatcttggcggggaagtcacggtagatgcaggcgaaaccattgtggtgtggattgagtactccagttcaactgttgataccgctgcgtttagtgagcaagacttccgtgatttctacggcatggattcctcagcccgcatcttccgagcaactggccaggcgggtctcgctaacggtggtgatcgtggcatccgagttctgtacaatggtgaagtttctggttggtcccactacccatcagatagcgcagcggttcaaaagggaattgacttcgcgctgccaaaagtaggggagcaggccagcattgcagtgcgcaccaaaactgatccaactccaggatcaattacttctgatcagttgattcctggcggattggacactccagaagagcctgaagcccctgaagactctctttttgaagggcgcactccccctagggatgcagcaccgctgatcctcactgaactaatggtcaactccaccaacatgggcagttctgatggttttgagtatgtggaaatcaccaacactactgccgaacccatcgatttttccgattacaccttgaactacctgtacccgcaggatgagttcaccaacaccaacgaagccgtctgggctgcggaacctggtgatgtcattattcagcctggaaaatctctcgtgttttggatcaaaaatggccccaatgatgaggcaaccgcagcagatttcaatgcagaatatggcaccaacctggaggctggaaaagaccttgttgaaatctcctcaggtgggatggccaatggtactgccagaggaatgcagattcagaccaacactggccacatagtcaaccgtggtttctacaacatggctggcgcttctgatgtgaaagccaacgagggtcttcatttcgcagtggatgagtctgatcttctgaagcaaacgcttgtcggcagcggtgcgccaaccccgggcactgtgtacacttcgcagattcctaatccactgtctgccgttatcgctgattcttctgtaccactcatcacagataataccgcaaccagtatcaaccctgcggagccgtttaccttcgccttcaatatcaccgatgatgtccaggtgcgcacggcaacactgcatgttacttccagtgctggcgaagccgcgacaaccatcaacctcaccgaggatgacggctctttcaattgggctctgcctgcagcggatctcaccggaaaatcctggttcgaatacaccgtaaccgccaccgacggattcaacagcgttaccaccgagccggtacgcgtcaccgtcgacggcgccaacaccgacccgctgcgcctcaacctggaagaaaaccaatgggtcagtggcaccaccgatgttatcggtgcttcagatgtcttcggcgacaagcttgaattgcttatcgacgacgcgcctgcagtcaccaactccagcctgtctgcggccccgacgtttgcgatggaagtaacccaaactgatgtgttcttccgcaacggcatccttgccggtggggaagaactccgcattttcgatcaaggaacttacgccaacaccgaaaccatctccacaccagtcccgctgtatcacatcaatgaggacggtaccctcacagtcagtgtgtatgcgggaactaaagcagcaccagaaattgacctcaacgagaacaatgacgatttccagatcagaaaccttcgactaattctgcctgatggccggaccctcacccctgccggaatttccgattctaatgcgtggctcaacatgggagacagcgctggaaaactcgatttcttcgatgccaccttcgccctccctgaggatgctttcaccggtgtggcacacgcatgggataccacccaaagcacagatggagaacaccacatcaccatttcccgcgaagacggcggggaaatcagccgcaccatccgggttgataatactgccccagaactcaccgtttctggagttgaagaaggacaagaactgcgcggcaccgtagaaattgatgcccaggcaaccgatgcgggtgcgggcgtgaagagcgtcgagacgcttctcgacggcgaacgcgtgcaacttccactaaccaccggttccatcgctttggataaaggtgaacacaccttggttatccgtgcagaagatgaagtaggaaaccgcaccgagaaaaccatcacgtttagcactccggatgaaaaccccatcagtggtgactacgctccaagcaatggggccaccgtgggcgtcggtgacgttaagttatctgcacgagcaagtgatccaagtggcgatactgtcaagatgacgttcctggaagccgattcaccaaaattagatagtggtcgcgtccgaatgtcatcaggaacggtagaagatgccggaagtgtctcgcgcgccgaggcgaaaatgttggagaggggagacgtcgagaagctatccagcctggatgggctgggcatggaagttacctccgacgccgcactgccgtaccagctttttgaagtcgatgcggcggatgcactcgcggccgacactgaagtgcgcctgaattgggcgggatccgccgatggtcgcgcgcaggtgatcatgtatgttttcgatggcgaggcgtgggttgaggtggatcgtcacttgaccggcgatgagctggaagagtttacgctgcagggcgtcgtcaatgcggaaaaatttgcaatcggcggcactgtcaccgtattgattcagcactccgaaggcttcgccggtgcggatcattcaactagaaattccgacgtgaccgcagcgcacccggatgatgtggctcgctctgagtacgatttcaccctcgcgtgggaatctgacacccagtactacaacgaggaattccacgagcaccaaaccaacatccatgactacgtgctcgccgaacgggagaacaagaatattcagttcatgttccacactggcgatgttgtcgacgactgggatcagcccgcgcagtgggccacagccaaccccgaataccagcgcctcgacgacgccggcctgccatattctgtccttgccggaaaccacgatgttggccacaccagcaatgactacaccgaattcagccgacacttcggcgaacagcgctacgtagacaacccgtggtacggcgaatcctaccaagacaaccgagggcactacgatctattttctgccggcggaattgacttcattaacgtagcgatgggctggggtccagacgacgaagaaatcgcgtggatgaacgaggtcctggccaagcatcccgagcgtgtggcgatcctcaacctccacgaattcatgctcaccaccggcggacttggcccgatcccgcagcgcattctcgacgaggtcgcagccaccaacccaaatgtcagcatgatcatgtccggccactaccacgacgcattccaacgcaccgactcctttgacgacgatggtgatggagtagatgaccgcaccgtcacctctatgcttttcgattaccaaggcctaccggagggcggacaggggtacctccgacttctccactttgataaccaaggccaaaagatgatggtgcgcacctattcaccatccctgaaggattacaactctgatgaaccctcactgttggggcctgcagaagaccccaacatgtatcaagaattcgaagtgtcctacgagcagctcggcatcaaaccagagggccgcaccctgatcggcgattccttcagcgccgatttcttgacctccaatgaaattggaatagttgatgaggttccttctggaacgatcgctttcacgaactggaaggacgtaaccgaaggtcgccacagttggtatgttcgctccgaggatcctttcggcggcgtcgagatttcacccgtgcagtccttcattgccggggaagaggctggcgggaacgcgcccggcactggaagctccaatggcggttcatcccacggattatggggtgcgcttgcgggattctttgccggagcggcagccctggctggagctgcgatcgcatttgtccccggaatttgggactatgtgaccaacgcattcaagcgataattatggataggtaaacgctctacacgg

SEQ ID NO: 220 - protein, 1434 aa, Corynebacterium glutamicum
MAVGQETDLLNAMETLAGVPSDLVVTEILPDTTSYDNFEFFEVHNTGSAPVTIGEGEYTFAYSFDDSADTSRDKALDLGGEVTVDAGETIVVWIEYSSSTVDTAAFSEQDFRDFYGMDSSARIFRATGQAGLANGGDRGIRVLYNGEVSGWSHYPSDSAAVQKGIDFALPKVGEQASIAVRTKTDPTPGSITSDQLIPGGLDTPEEPEAPEDSLFEGRTPPRDAAPLILTELMVNSTNMGSSDGFEYVEITNTTAEPIDFSDYTLNYLYPQDEFTNTNEAVWAAEPGDVIIQPGKSLVFWIKNGPNDEATAADFNAEYGTNLEAGKDLVEISSGGMANGTARGMQIQTNTGHIVNRGFYNMAGASDVKANEGLHFAVDESDLLKQTLVGSGAPTPGTVYTSQIPNPLSAVIADSSVPLITDNTATSINPAEPFTFAFNITDDVQVRTATLHVTSSAGEAATTINLTEDDGSFNWALPAADLTGKSWFEYTVTATDGFNSVTTEPVRVTVDGANTDPLRLNLEENQWVSGTTDVIGASDVFGDKLELLIDDAPAVTNSSLSAAPTFAMEVTQTDVFFRNGILAGGEELRIFDQGTYANTETISTPVPLYHINEDGTLTVSVYAGTKAAPEIDLNENNDDFQIRNLRLILPDGRTLTPAGISDSNAWLNMGDSAGKLDFFDATFALPEDAFTGVAHAWDTTQSTDGEHHITISREDGGEISRTIRVDNTAPELTVSGVEEGQELRGTVEIDAQATDAGAGVKSVETLLDGERVQLPLTTGSIALDKGEHTLVIRAEDEVGNRTEKTITFSTPDENPISGDYAPSNGATVGVGDVKLSARASDPSGDTVKMTFLEADSPKLDSGRVRMSSGTVEDAGSVSRAEAKMLERGDVEKLSSLDGLGMEVTSDAALPYQLFEVDAADALAADTEVRLNWAGSADGRAQVIMYVFDGEAWVEVDRHLTGDELEEFTLQGVVNAEKFAIGGTVTVLIQHSEGFAGADHSTRNSDVTAAHPDDVARSEYDFTLAWESDTQYYNEEFHEHQTNIHDYVLAERENKNIQFMFHTGDVVDDWDQPAQWATANPEYQRLDDAGLPYSVLAGNHDVGHTSNDYTEFSRHFGEQRYVDNPWYGESYQDNRGHYDLFSAGGIDFINVAMGWGPDDEEIAWMNEVLAKHPERVAILNLHEFMLTTGGLGPIPQRILDEVAATNPNVSMIMSGHYHDAFQRTDSFDDDGDGVDDRTVTSMLFDYQGLPEGGQGYLRLLHFDNQGQKMMVRTYSPSLKDYNSDEPSLLGPAEDPNMYQEFEVSYEQLGIKPEGRTLIGDSFSADFLTSNEIGIVDEVPSGTIAFTNWKDVTEGRHSWYVRSEDPFGGVEISPVQSFIAGEEAGGNAPGTGSSNGGSSHGLWGALAGFFAGAAALAGAAIAFVPGIWDYVTNAFKR

SEQ ID NO: 221 - DNA, 787 bp, Corynebacterium glutamicum
  CDS (101)..(757): RXA01966
gctgtccaaggccatgaattttgtgtcctctgttgctccaaccgctgtgctctcccctgttatgggctgggtttataagaagatgggttagtttttaaaagtgtctgaatctgaaaacaacacaacaccagcagtcgcagctcgcgatgaccgtctggtctgggtcgatctggaaatgactggtctagatttgaagcgccacgtgatcgtggaggttgcggcgttggtcactgacgctaacctcaacgttttgggcgagggcgtggacttggttgttcacgcaactgaagaagagctcgcgcagatggatgattttgtcaccaacatgcacgaatcctctgggctgactgagcagatccgggaatccgcggtcacgttgaaggaagccgaagatgctgtgctcgcattgattgaaaagcactgcgatccagcccatcctgcaccgctagctggtaactccattgccactgaccgcgcgtttatccgcgaacatatgccacgtcttgatgaggccctgcattaccgcatggtggatgtgtcctcggtgaaggaattggcgcgtcgctggtacccacgcgtgtactacaagcagccggagaagggtttggcgcaccgcgcgttggcggacattgtggagtcgattcgggagttggattactaccgtcgctcattttttgttgcagagcctggtcctacctctgagcagtgcgcagatgatgcgcaggcagcggtggaccgttttgcaccctactttgattagagggttttaagcagcctggtgagttcg

SEQ ID NO: 222 - protein, 219 aa, Corynebacterium glutamicum
VSESENNTTPAVAARDDRLVWVDLEMTGLDLKRHVIVEVAALVTDANLNVLGEGVDLVVHATEEELAQMDDFVTNMHESSGLTEQIRESAVTLKEAEDAVLALIEKHCDPAHPAPLAGNSIATDRAFIREHMPRLDEALHYRMVDVSSVKELARRWYPRVYYKQPEKGLAHRALADIVESIRELDYYRRSFFVAEPGPTSEQCADDAQAAVDRFAPYFD

SEQ ID NO: 223 - DNA, 1288 bp, Corynebacterium glutamicum
  CDS (101)..(1258): RXA01982
tgccgccgaccatgagatgatcaagcgctttttcaccctgcaccttcgctaagactctaccttcacccaactcatcatctactgaaagaaggcttctgctatggctaccaccagcctccccacgacgattacaccggattccgaggagaccgtagaaaagcgtcactccctgaccccgatcctggattcacttccctgcgagtcagttccctatgctctggctgcaggtgagggacaacaacaccagcttggcccctaccatctcacagttatgtcccgtcccgaagacaacggtggaatattttcgctggctcgtgtgagcgcaggcaagactcccgccacccggttcttctctgtcgcaggaccgacgttcctctacatgatggaggggcggttgactctctggttcgctgatggacgtcaagagatcatcgctggcggcagtgccaccattcctacgaatacgccctggtccttcgcctgtgagggcctagtaaattcagctctagtgtactactcatcctcgaatgcattcctacacgcggcagagaaacttggcacgtcctcgttctcccacaccttccgcgtcagtggcgaggtcacagggattccctacgaggaactggaggattgcggattcacattctatgagcgggaccaccttgccgagctcgggccgcatttcgatcgcctcccagaagatatgaaggcgtttgccctgaacgatggtgagggggaccggcttgagcagttcgagcagatcaacagcttcgtctgccgtccgagacacaccggaaatcagttcctcgctatgcagaccaagggtgccaagacgccttatatacctcgtcatttccaccgccttcacaccgaaaacttcatctgtctggacgggcgcgtcaaactgcacgtcaacggtcaagagatcatcctctcccgtggggattacgttcatgccccagccggaaccatccactctttcgccttcgcagggcacaatacccagatgctgggagtgctcaccacagaggtattcgagaagttctttgactacataaacactccgactaatgctcgagttcagctggaggacggggggaagccattttttcctgctgaagcattcgcgaaagtccaagctgaactcgatgtcgtggtggtcggccccccacgaattagtaccctggatgttgttacaaactcgcgtttcgaaccaattaacagaactatcacctatcgtgcgctggacgctaaccaatagtgagtgagccgaaatccctgtttgtaa

SEQ ID NO: 224 - protein, 386 aa, Corynebacterium glutamicum
MATTSLPTTITPDSEETVEKRHSLTPILDSLPCESVPYALAAGEGQQHQLGPYHLTVMSRPEDNGGIFSLARVSAGKTPATRFFSVAGPTFLYMMEGRLTLWFADGRQEIIAGGSATIPTNTPWSFACEGLVNSALVYYSSSNAFLHAAEKLGTSSFSHTFRVSGEVTGIPYEELEDCGFTFYERDHLAELGPHFDRLPEDMKAFALNDGEGDRLEQFEQINSFVCRPRHTGNQFLAMQTKGAKTPYIPRHFHRLHTENFICLDGRVKLHVNGQEIILSRGDYVHAPAGTIHSFAFAGHNTQMLGVLTTEVFEKFFDYINTPTNARVQLEDGGKPFFPAEAFAKVQAELDVVVVGPPRISTLDVVTNSRFEPINRTITYRALDANQ

SEQ ID NO: 225 - DNA, 1078 bp, Corynebacterium glutamicum
  CDS (101)..(1048): RXA02021
ttgggtcgccgaggagatctaatcctggtttgagttcagagttcacaggtttaagcctacaaaccttagttaaaacatgatggaagcggtcgattaaaaaatgagtgaaaacattcgcggagcccaagcagttggaatcgcaaatatcgccatggacgggaccatcctggacacgtggtacccagaaccccaaattttcaacccggatcagtgggctgaacgctacccattggaagtgggcaccacacgcctcggagcaaacgaactcaccccacggatgctgcagttggtaaaactggaccaagatcgcctcgtcgaacaggtagcagtccgcaccgttatccccgatctgtctcaacctccagtagacgcgcacgatgtttacctgcgcctccacctgctttcccaccgcctggtccgcccccacgaaatgcacatgcaaaacaccttggagctgctgtccgacgtggtgtggacaaacaagggcccttgccttcctgaaaactttgagtgggtgcgtggtgctctgcggtcccgcggactcatccacgtctactgtgtggaccgtcttccccgcatggtcgactatgtggttccccctggagtccgcatctccgaagcagaacgcgtgcgcctaggtgcataccttgctccgggtacctctgtgctgcgtgaaggtttcgtgtctttcaactccggcaccttgggtgccgcaaaggtggaaggccgcctgagttccggtgtggtcatcggtgaaggttccgagattggactgtcttctactattcagtccccgagagatgaacagcgccgccgtttgccgttgagcatcggccaaaactgcaactttggtgtcagctccggaatcatcggagtcagtctgggagacaattgcgacatcggaaataacattgtcttggatggagatacccccatttggttcgcagccgatgaggagttacgcactatcgactccatcgaaggccaagcaaattggtcaatcaagcgtgaatccggcttccatgagccagttgcccgcctcaaagcttgacccattttcataaccagtgccatgtgg

SEQ ID NO: 226 - protein, 316 aa, Corynebacterium glutamicum
MSENIRGAQAVGIANIAMDGTILDTWYPEPQIFNPDQWAERYPLEVGTTRLGANELTPRMLQLVKLDQDRLVEQVAVRTVIPDLSQPPVDAHDVYLRLHLLSHRLVRPHEMHMQNTLELLSDVVWTNKGPCLPENFEWVRGALRSRGLIHVYCVDRLPRMVDYVVPPGVRISEAERVRLGAYLAPGTSVLREGFVSFNSGTLGAAKVEGRLSSGVVIGEGSEIGLSSTIQSPRDEQRRRLPLSIGQNCNFGVSSGIIGVSLGDNCDIGNNIVLDGDTPIWFAADEELRTIDSIEGQANWSIKRESGFHEPVARLKA

SEQ ID NO: 227 - DNA, 829 bp, Corynebacterium glutamicum
  CDS (101)..(799): RXA02032
tggcgcaaccacttccatttcgaaggggagtagttccacacaaaggcgatctgactcgtttttgtttgaggtatgttcgacatactggagcaagttcaccttgcacccggcataccacctgaacaaggccttaaaaaggggctttatcggttcaggcgagcgagaccttcggcgttcacacttcgccggggtctattttttatgcccaggcacggctcataggagaaccatgccctttctacaaatctctctgctttccatcggtgtcgccgccgatgcgtttgcttgttccgttgtccgcggcaccgccattcaagtcaaccttttcaaacgcgcacttgttctcgcgggcatctttggtgtcttccaagcggcaatgcctttaatcggctggttcattggccgtttctttgctggaatcaccttcatcgctgaaattgatcactggatcgcttttgcactattgggtattgtcggcaccaaaatgatctgggatgccttccaacctgaagatgatgaaaccattgtcgatgacggccgcgttcaatttagaccagcaattatcctggggctagccaccagcattgacgcattagccgtaggcatgggcctggcattcgtggaagtttccatcctcaaagtggcactgtccatgggcagcatcaccttcgcactttcgcttgctggcgcctggatcggacaccatggtggaggaaagtttggcaagtgggctacgattcttggcggaataatcttgatcggaatcggcgcaaacatcgtctacgaacacctcagcgcgtaaccctcggcgcattatcctcagacagct

SEQ ID NO: 228 - protein, 233 aa, Corynebacterium glutamicum
LHPAYHLNKALKRGFIGSGERDLRRSHFAGVYFLCPGTAHRRTMPFLQISLLSIGVAADAFACSVVRGTAIQVNLFKRALVLAGIFGVFQAAMPLIGWFIGRFFAGITFIAEIDHWIAFALLGIVGTKMIWDAFQPEDDETIVDDGRVQFRPAIILGLATSIDALAVGMGLAFVEVSILKVALSMGSITFALSLAGAWIGHHGGGKFGKWATILGGIILIGIGANIVYEHLSA

SEQ ID NO: 229 - DNA, 709 bp, Corynebacterium glutamicum
  CDS (101)..(679): RXA02053
aaccagccagaaactatctccaaaagctaataaaacccttgcactgacaaataaggcgacctaccatgactctgtttccaacacataaaaaggataaaaaatgtcactttcagtcgtcgaggcgattaccaaccgccgcgccacccgcaaatacaccgatgaagctcctacccctgagctgatcgacaaaatcgttgaccttgccctggaggcacccagtgcgttcaatgcgcagcaacgtgaaattgttgtgattactgatcccgcacagaagcagaagctttacgaggcctcccatcagaaacaattcctcaccgcacctgtaactttcattgcggttgcccgcgtggaaaacgagcctgaggatttggaagagattcttggtacggaaagggctgaacgtgtcgcgggattcatcaacggtcgcagcattcagcaggcacgcgaagcaacgttgagggatgccagcctcgcggcggcttttctaattctggctgcccaggcggagggtttgagtaccagcccgactactggttgggatgaggaaaaagtgaaggaagcaatcggtctcggcgggcgtgaggatcgtgcaatcgcccttgttattgctaccggattccctaatgaacagccggagcaccctggtcgtttgcagaataggcgcatcgacaacagctactaactctgccagctcgcccggacgaactaa

SEQ ID NO: 230 - protein, 193 aa, Corynebacterium glutamicum
MSLSVVEAITNRRATRKYTDEAPTPELIDKIVDLALEAPSAFNAQQREIVVITDPAQKQKLYEASHQKQFLTAPVTFIAVARVENEPEDLEEILGTERAERVAGFINGRSIQQAREATLRDASLAAAFLILAAQAEGLSTSPTTGWDEEKVKEAIGLGGREDRAIALVIATGFPNEQPEHPGRLQNRRIDNSY

SEQ ID NO: 231 - DNA, 796 bp, Corynebacterium glutamicum
  CDS (101)..(766): RXA02058
gcgctatgatgtgatttgttccccagaacgtgctcgggaagctcgagacatgattgccctgaaaactcgagatctccgccaataagttaaactaacgcctatgaaaaatgtggggaagcggattttagtccttgcgcttggtgcctcggtagcgggatgctcaacgctttcccaagaaccttcaccacctgttccgttgggaaacgttgatactgtgcagattgtctctcccaatggggagattgagtcttttgtgctggggaagctgtatgagaccgcattagtggaacgtggcagatctgcatcagttcagctgattgacggcgacttggatgagcaactatctatgctgcgagatgacagcactgatttggtgattgcttgctcaggacaattactggaatattacaacccagatttagcctccgagtttgccgtcgaatacgctaatcagacagcctttgataaaaactctggtgaatggcgcgaaaaagtctacgatgctctccaaggatcgctgccggactccatcgtggccaccgatccttccaatgctattggttgtaaggacgatacgtcgctgcctcaaaacatcgtgccaatttatagaaagcccaatctggatagggacaatcgggacaccctgaactttgtgagcggttctttgggtacaagcgatttggaagcattggtcaaggacgcccaaacaacaggcacaacctctgaaactgcgctggatttcttattgtctaaaggattttcacgctagttcagccgtggtgatgcacgtgggggc

SEQ ID NO: 232 - protein, 222 aa, Corynebacterium glutamicum
MKNVGKRILVLALGASVAGCSTLSQEPSPPVPLGNVDTVQIVSPNGEIESFVLGKLYETALVERGRSASVQLIDGDLDEQLSMLRDDSTDLVIACSGQLLEYYNPDLASEFAVEYANQTAFDKNSGEWREKVYDALQGSLPDSIVATDPSNAIGCKDDTSLPQNIVPIYRKPNLDRDNRDTLNFVSGSLGTSDLEALVKDAQTTGTTSETALDFLLSKGFSR

SEQ ID NO: 233 - DNA, 625 bp, Corynebacterium glutamicum
  CDS (101)..(595): RXA02059
tcgggaaattccactcatgaacgcctagtctacgggaaccatttcaccagcgtgtacgttgtaaatgtgaactgaaaaagtgaaaaggaagatgataaagatgactcaaccacggcccgatgccgcatctgtgtcgctggaaaagaagcgcccagaaggatggccagtgggaagctttgaaacatacccagaagcccaagcagcagtggatttgctcagtgataatgcattccccgtcaccgaattgaccattgttggtgtggacctgattgaagtggaacgcgttacaggtcgtctcacgtggggtcgtgtgattgccggaggaatggcatctggcgcatggttgggtctgttctttggcattgtcatggccttgatgtctggattctggttctcttccatcgcagcgggaataggtatgggtttggtgtttggcattgtcggtgcagcagttccttatgctgcttccaaaggcaagcgggactttacctcttcaactcaaattgtggcggggcgctatgatgtgatttgttccccagaacgtgctcgggaagctcgagacatgattgccctgaaaactcgagatctccgccaataagttaaactaacgcctatgaaaaatgtg

SEQ ID NO: 234 - protein, 165 aa, Corynebacterium glutamicum
MTQPRPDAASVSLEKKRPEGWPVGSFETYPEAQAAVDLLSDNAFPVTELTIVGVDLIEVERVTGRLTWGRVIAGGMASGAWLGLFFGIVMALMSGFWFSSIAAGIGMGLVFGIVGAAVPYAASKGKRDFTSSTQIVAGRYDVICSPERAREARDMIALKTRDLRQ

SEQ ID NO: 235 - DNA, 1255 bp, Corynebacterium glutamicum
  CDS (101)..(1225): RXA02070
aacagcacggatcaggacctcaagatttgtctgaccccactcagggtgatgttgcagacgaattttagggagtatcaaaacttgggactactatcgatacgtgatgactcaagtaaccgaatccgctgtccgcagcgcgctatcccgcgtagaggatccagagatcggtaagcccatcacagagctcggcatggtcaaatcagtgtccatcgacggctctgatgtccaggtggaggtctacctgacgatcgcggcttgcccgatgaaaaccaccattgtcaccaacactgaagcagctctcaaagacatcgacggggttggccaagttcatgtcaccaccgatgtcatgagtgatgaacagcgccgtgcgctccgcgtctccctgcgcggtgaaacttctgagccagtgattccattcgctcagcctggttccactacccgcgtttacgctgttgcttccggcaaaggtggcgtaggaaaatcctccatgacggtgaacttggctgcagccctagccaagcgcgggctgtctgtgggaattttggatgccgatatttacggacactcagtgcccggaatgctcggctcggaccaacgcccacaccaggtcgatgacatgatcatgcctccccaggcgcacggcgtgaagatgatatccattgctcacttcaccgaaggaaatgctcctgtggtgtggcgtggaccaatgctgcaccgtgccatccagcaattcctcactgacgtgttctggggcgacctggatattttgctgctggatcttcctccaggaactggtgacatcgccatcaccgttgcccaattgatcccgaatgctgagttgctcattgtgaccactcctcaggctgccgcagctgaggttgccgagcgagcaggaacgatctctgtgcagaccaaccagaaggttgctggcgtgattgaaaacatgtctgccatggtgcttcctgatggcaccaccatggatgttttcggcaccggcggcggtcaaaagattgctgatcgtcttaccgctgtgacaggtgaagaggtcaaggttatcggatctgttccattggatccgaacctgcgtatcggtggcgatgtgggaaatcctattgcgatttctgaaccacactccccaaccgctgcagcgatcaatgagatcgctgaacacctagctcaccgcaaggtatcgctggtgggtaaaacgcttgggcttggcgttaaataaaagctaaataatatcggtccaagagac

SEQ ID NO: 236 - protein, 375 aa, Corynebacterium glutamicum
VMTQVTESAVRSALSRVEDPEIGKPITELGMVKSVSIDGSDVQVEVYLTIAACPMKTTIVTNTEAALKDIDGVGQVHVTTDVMSDEQRRALRVSLRGETSEPVIPFAQPGSTTRVYAVASGKGGVGKSSMTVNLAAALAKRGLSVGILDADIYGHSVPGMLGSDQRPHQVDDMIMPPQAHGVKMISIAHFTEGNAPVVWRGPMLHRAIQQFLTDVFWGDLDILLLDLPPGTGDIAITVAQLIPNAELLIVTTPQAAAAEVAERAGTISVQTNQKVAGVIENMSAMVLPDGTTMDVFGTGGGQKIADRLTAVTGEEVKVIGSVPLDPNLRIGGDVGNPIAISEPHSPTAAAINEIAEHLAHRKVSLVGKTLGLGVK

SEQ ID NO: 237 - DNA, 475 bp, Corynebacterium glutamicum
  CDS (101)..(445): RXA02084
cgttgatggttgggtggtgggtcacagtttagaaaaagtgacttcaaatcacgtcgaaaagaaattgaaagtacttaagaaacatgtcacgctaggagacgtgataatcattgcaagcgttgttttcctcctcgttggcgcaatgttggcgaatgctgccgctgcgctctttagtgccagcgagccattcggacgaatttcctacctcattggcctacctaacgaagacgacttcgtgccgtactcactacggttcgtggcctttttcccactgatgctctccgcatcgatggcagcatccttcttcggggtgtgggcagtactaatcattcctttcggttacttcccatcactgatgatggttcataagcacaacaagcaggtacagcgaacctgggattccgtcaccgttgctgacttctacgaggattccacccctctggtctaatttcgatttctaaatgtcatattggcc

SEQ ID NO: 238 - protein, 115 aa, Corynebacterium glutamicum
VIIIASVVFLLVGAMLANAAAALFSASEPFGRISYLIGLPNEDDFVPYSLRFVAFFPLMLSASMAASFFGVWAVLIIPFGYFPSLMMVHKHNKQVQRTWDSVTVADFYEDSTPLV

SEQ ID NO: 239 - DNA, 781 bp, Corynebacterium glutamicum
  CDS (101)..(751): RXA02091
agatctagccaacgaacttgatttcatcgagccggaagagacagaagaagagcagcaattgaagtggcttagccttatgcagttttttggaagtagataaatgagcatctggaaacgtctgttagtgcagtacccgcgcttcgccgacaccctcacagccggccaacccatcacgctcgaggaattagcaaccccggaagtgatcttggaagctgttgccaaaggccaagaaattttcggcattgagcagccaaaacatgcagcacaactctggtttcactccctgtgcaccgcaattgtcggccccgccgtcaccgccatggtggaattcgatgtcatccccagcctcgacatacgtcgaggtcagctgcataacatcgacggttactggttcggcttcaggccggaggagatgcttgtcgacgcctccctccacctgtcgggcacccaattcggcgagagtatccgcgtggtgattgatgcattatgcgctgccacggatctgcgaccggcacccctgtgggcggttgcctcagatgcgttgggaatcgcagctagcggcgcaggtgtcgaggcctttgaagaagaacatgcccgcgaggtggcggaagccctcattgaaggaatgaatagtgtgaactcagttccatcgccgcggtttaacgacgacgattatttcattcgagctggatgctgcatgattttccactcaccacgagctgatttttgcacgtcgtgcccacagaagaggtgaaaggctaggcgcggattcgttgtggac

SEQ ID NO: 240 - protein, 217 aa, Corynebacterium glutamicum
MSIWKRLLVQYPRFADTLTAGQPITLEELATPEVILEAVAKGQEIFGIEQPKHAAQLWFHSLCTAIVGPAVTAMVEFDVIPSLDIRRGQLHNIDGYWFGFRPEEMLVDASLHLSGTQFGESIRVVIDALCAATDLRPAPLWAVASDALGIAASGAGVEAFEEEHAREVAEALIEGMNSVNSVPSPRFNDDDYFIRAGCCMIFHSPRADFCTSCPQKR

SEQ ID NO: 241 - DNA, 3502 bp, Corynebacterium glutamicum
  CDS (101)..(3472): RXA02097
ttggctacagatgtttcagcgcttgcagtggggtagtgtgtttaaacatcacaattagttctagaggaaaacgcattttttgcgcggggagagtgtatacatgccggctggcatcgcagacatgacagattcattgctcggatgggcatcacaaactgagctggatctgaaccagcgtcttgcaggggtagagtactttccacaaattcagctgcgacacgatgagctcgagcgcattcatcggttttacggcacctttttgtcccgccaggtaggcgcgggcgcaagccttggggatctttttgaaatgaccccatgcctgacagtcaccaccttggtgtctcgggcgtcacggatcagcgatccagcagatttcttcggtgaatacatcggaggactgggacttagcgcagaacacgcagcagttgttgaagggttgaccgaaaagctcttcgcacaggctggcctgctcgttcctgagggaattgcatctccattggagttgttatccatccacgcaggcattagtaaccacgaagtggccgcagtgctgaccgaagtggaaaacggcaccaccgaatatccattcatgttcgacgctgtcctgcgcctaacccctgagtgggcacagacccttatcggcggagttcaagaactcattgaatttgccaccacccaccgaacttcttggtcagaccgccagcgcgaatcctcactgccagccatgatcgatgagatcgttgtggcggaacttcgggaacgcccagttggtactgccgaccgtgaaaactccgttggtgtggcacttcgtgagcttcgcccacgcctcatcctggatgcagaacgccgcaaagtctgcctgcgtctacctgaacagcgcgtcagcgacgatgaaatcaactggcgagtcagcctagaaggcaccacccggattttctccacccgccgagcatggggcgatacttctggatactccgaagccctcgacatcactgtcgagcgtcaaatccgcgaaaccaccgtcaccgacacctcaaaccaaatcacctgggttgtcccagtcgtggacttcaacgacccagtgctggtgttttccgcgcgcggtgaaaacctcaccgacaaggtctccctgcaccatcaagagatttacgttctcgcgccagcggaagcaaaactcgaagacatggtcactggccagccagtaccagttattgagcaattcctcgtagagggctggaactcatgggtgtgctcccgcgtggacgcccgtggcctgtcctctctgaaggtcaacaaagaagtccgatgcattgacccacgtcgacgcgttgccttccaccacccagccgaattggtccctcacgtacgatccatttccggactccccgtacacgcgcagtccctgatcgccgagttcccaccaaccctgagcggacaagacgaaacctggatgctctccatctcggctttcgcaggtgtaggcgctgctggtgaagaaatcgccgagccagagcctttggaagtccctgccgacggtggccttttcgccatcttcgacccagaaatatacgacgccccatgggtgggtgaatacctggtccgactccgcggcccacgcaatgaatccttccgacccgaattcgccatcgtcgaagacatgaccaccgaattcgaagtcgcctcaggtgcatcatttcgaatcccaaccaccactggtctcagcgaagccagcctacgcgtgcgttccggtgaaaagcacttcaccgcagagccacgcctggtcaccgttgaagcaaccgaccccaacgcatcattcgtggtcaccaccgatgaaggcgatcaaatgccattgcgatttgtgccaccacaaatcgccatcgaacttccactgaccaccgagccaccaacctggcgcgtcacccgtactgtctgtggaccacgcgacctcgacggtgcaggcgaactccgcatccgcaccggtgtcgatgtcggcgatccaaaggtcagtgtgcgcaaccaccacggttcaccactgcgaaccgtgaaaatggtcacccctgacaacggccgtacctggattgccagcatgaaggaaatcgcagccagtacctttgtgatgccacgcggatccatcgaatttgagtggactgaccgcaaggttgaccgtcgcgtttccgtgacgattgctgtcattgacaaaactgagaactttactggcatcaccatcgaagatggaaagctcgtattcgaagaactcgcagccggtcgccaactcgctgcatgggtgtggccacaaaccgcaccgtgggtaagcgcagtggaacttgctgtcaccggaccagagctggaactccctgaagttctcgtcggcgcaggcaacctgattgttcaactccacaccgctgacccattcactacctccgtgaccccactgtcaccaggaaaagctgcggtcaccgttgagcaagaaggctactactcagcacaaaccgaagaatatgcacagctttcagcattcttcggtggggaagtagaagaaccaccaatcagtgacgctgtggtccccgcactttgggatgtttcccatatctggaccgaacagggaaacaccgagcatcttccagtagtccatgccgccctgcgctcctcaccagccgcagcactgaagggtctgtccgcttcgctggttcccgcacaggcactacctggaaaagtcatttcctccggactggcagcctcaccgttcaccacggaatcaccagcaacagaagtgcaccgcaccgcatggatcggaaccctgcaactcctgggtgcactgccaagcgcattcaaggaagccgaagagcttggcaaccgcacaccactgctgccaatcctcggacaacttgaggaagtcgccggcaagaacatcctgtccacccttgcaactggccgtgactccactttggacaccgcatgcatcgaccaatccaccgttgcgattgccggcatgaacgaaacccagcaaaaagccctgctggacatgttcttcagcaacgccgacatcgttcctggaccactaatggaagacaacacccgcctcatggcagtgttcgaaaccttcaagaagcgcgatgcactccgtgaggttctccagactgaaggcttgattaagaccgctgtagaacttcttcgtgccatgcgtggaacccagcgtcagctgtattcctccgcacgtattcgattcgacaagctcgatggtgtcaacactgacaacccagaaaacatgtgggcactcaccccagttgtgtcactggtgttcgcgttgtcatcccgtttgcatgcacacgaattgatcggcaagacccgaactctcgatcgtgcatctgccggttggggtcgaatcgctgatctggtgccagaccttgtcaccggtgacttgatctccgcggaggcaatggttttgggagctcgaaacccaggactcgtcgattagtccctgatttcatcggagggcacctag

SEQ ID NO: 242 - protein, 1124 aa, Corynebacterium glutamicum
MPAGIADMTDSLLGWASQTELDLNQRLAGVEYFPQIQLRHDELERIHRFYGTFLSRQVGAGASLGDLFEMTPCLTVTTLVSRASRISDPADFFGEYIGGLGLSAEHAAVVEGLTEKLFAQAGLLVPEGIASPLELLSIHAGISNHEVAAVLTEVENGTTEYPFMFDAVLRLTPEWAQTLIGGVQELIEFATTHRTSWSDRQRESSLPAMIDEIVVAELRERPVGTADRENSVGVALRELRPRLILDAERRKVCLRLPEQRVSDDEINWRVSLEGTTRIFSTRRAWGDTSGYSEALDITVERQIRETTVTDTSNQITWVVPVVDFNDPVLVFSARGENLTDKVSLHHQEIYVLAPAEAKLEDMVTGQPVPVIEQFLVEGWNSWVCSRVDARGLSSLKVNKEVRCIDPRRRVAFHHPAELVPHVRSISGLPVHAQSLIAEFPPTLSGQDETWMLSISAFAGVGAAGEEIAEPEPLEVPADGGLFAIFDPEIYDAPWVGEYLVRLRGPRNESFRPEFAIVEDMTTEFEVASGASFRIPTTTGLSEASLRVRSGEKHFTAEPRLVTVEATDPNASFVVTTDEGDQMPLRFVPPQIAIELPLTTEPPTWRVTRTVCGPRDLDGAGELRIRTGVDVGDPKVSVRNHHGSPLRTVKMVTPDNGRTWIASMKEIAASTFVMPRGSIEFEWTDRKVDRRVSVTIAVIDKTENFTGITIEDGKLVFEELAAGRQLAAWVWPQTAPWVSAVELAVTGPELELPEVLVGAGNLIVQLHTADPFTTSVTPLSPGKAAVTVEQEGYYSAQTEEYAQLSAFFGGEVEEPPISDAVVPALWDVSHIWTEQGNTEHLPVVHAALRSSPAAALKGLSASLVPAQALPGKVISSGLAASPFTTESPATEVHRTAWIGTLQLLGALPSAFKEAEELGNRTPLLPILGQLEEVAGKNILSTLATGRDSTLDTACIDQSTVAIAGMNETQQKALLDMFFSNADIVPGPLMEDNTRLMAVFETFKKRDALREVLQTEGLIKTAVELLRAMRGTQRQLYSSARIRFDKLDGVNTDNPENMWALTPVVSLVFALSSRLHAHELIGKTRTLDRASAGWGRIADLVPDLVTGDLISAEAMVLGARNPGLVD

SEQ ID NO: 243 - DNA, 1351 bp, Corynebacterium glutamicum
  CDS (101)..(1321): RXA02104
accttttcgatagccgtatatgccatggacccactcctcaattgggcgaccgttagacttgaaacactaaggctagagattttaactaaagagtctcctcatggattcccatttggagccttatttacacaggccacctggcttgtttcccaccgcgatgtgccacaataacgccataacagaaaggcatactgacacaatgtccaactcccccaccgacgtttcaacgagcgcacctcgaattatgatcgcgccagattcctacaaaggaaccgctaccgcatcagaagctgcgcaatacttaggcgaaggcgtgttggaaattttgcccaacgcctccattacgttggcacccatggccgacggtggcgaaggaacatcctcagttttcggcgggcaggtcataacattacccacgacaaatgccgcgggacgcctcaccgaagccagctacaccttagattccgaaacaaacactgcctacattgacatcgccgcagcctccggtttgcccgccgttgcagacgatctagtccccaccaccggcgatacctacggcaccggcgttttgatcgcagacgcggtcacccgtggcgcaactcgcattgctttaggccttggcggatcagccacaactgacgccggctcaggaattctcatcgccctcggcgccgtcccacgcaacaaagagggctacgcactacgaaccggtggcgccgacctcatcaacctcgattacatcgataccgccgaactcaacatccccgcagccgccgtcgaatggatcctgctcaccgatgtcgacgcccccgccaccggcccgcagggcgcggccaccgtattcgggccccaaaaaggtgccaccgaaaaagacatttcgcttctcgacgccgccctccaccacgcctgcgcccaactggaagttgatggcacaaagccaggtatgggcgcagccgggggcattgcaatcggactgacgtggctgtccaccctcatgcacggcaacgaccaacagatccatatcctccccggcgcgccactgattgcccgctccaacggaatcgaggatgcgctgccagaaactgacttgttgatcaccggtgaaggccgactagattcccaatcgttcaccggaaaggttgtgggcaccctccacggtttagctaaagcccacgatgtggatctcgctgttgcggccggcatcgtggaaggcggtattcccgatgatttcctagcggtagaaatgattaaatcctccgacgttgcagcacaattacgtgatgcaggccgaaggatcgctcaagaatacgtagctcaaaactagcgaaggatctccacagtccatgggtag

SEQ ID NO: 244 - protein, 407 aa, Corynebacterium glutamicum
MDSHLEPYLHRPPGLFPTAMCHNNAITERHTDTMSNSPTDVSTSAPRIMIAPDSYKGTATASEAAQYLGEGVLEILPNASITLAPMADGGEGTSSVFGGQVITLPTTNAAGRLTEASYTLDSETNTAYIDIAAASGLPAVADDLVPTTGDTYGTGVLIADAVTRGATRIALGLGGSATTDAGSGILIALGAVPRNKEGYALRTGGADLINLDYIDTAELNIPAAAVEWILLTDVDAPATGPQGAATVFGPQKGATEKDISLLDAALHHACAQLEVDGTKPGMGAAGGIAIGLTWLSTLMHGNDQQIHILPGAPLIARSNGIEDALPETDLLITGEGRLDSQSFTGKVVGTLHGLAKAHDVDLAVAAGIVEGGIPDDFLAVEMIKSSDVAAQLRDAGRRIAQEYVAQN

SEQ ID NO: 245 - DNA, 1561 bp, Corynebacterium glutamicum
  CDS (101)..(1531): RXA02123
accaggcagaacctgaccagttgttggggtttgcccatgccgaatgagtaaaaccacagtggattgagtcttttcggcagctgcgtgtgaacccggcttcatgacatgcagcatacctgtgcgaaaaattcctgaccgcccacttaaaaaaaggtctagggtgtggggtgtgagtcttccaccaaatgtacaaactgtcggtgagctgaaggccgccggccacatctaccgacctttgcgcgtagaaatccgcgacaacctcctagccaaacttcgcagcggcgaagatccgtggccaggcctgcacggcctgaactacacggtcatcccgcagcttgaacgcgcgctcatcgccggccacgacatcgtgctgctcggcgaacgcggccagggtaaaacccgcctgctccgcacgttaataacgcttctcgacgagtggtccccgatcattcccgggcgcgacgttccagaacaccctcttgcgccaaacgtagagatctccgatgatcagcccattgaatgggtacaccgcgatgcgcgctataccgagaaacttgccaccccagatacttccgtggctgatcttatcggtgatgttgacccaatgcgtgttgctgaaggccgcagcctcggtgatctagaaaccattcactacggtctgattcctcgcgccaaccgtggcatcgtggcgatcaacgagcttcctgacctcgctgaacgcatccaggttgccatgctcaacgtcatggaggaacgtgatgtgcagattcgtggctacaacattcgtttggacttggatgtgctggttgttgcctcagccaaccctgaggattacaccaaccgtggccgaattatcactccgctcaaagaccgcttcggtgcagaaatccgcacccactacccacttgagttggacgatgaagtggcaattatccgccaggaagcagagcttgttgcgcaagtccctgatatcttggttgaaattcttgcccgctacacccgagcgcttcgtgaatcctcatcggtgaatcagcgttctggtgtgtctgctcgtttctccattgcaggtgcagaaactgtggccgcagcagctcttcgacgcgcagcagtgttcggcgaagatgaggccgttgcccgcctggttgatttggaagcagccgtggaagtcctcggcggcaagattgaatttgaatccggcgaagaaggacgcgaatgggaaatccttgattatctcctgcgcaccgcaaccgcagaagcgctgcgttccactctgcgctcgctggatctcaccccgctcatcgcagcattagacggcagcatcaccgtttccactggcacgaacatcaccgcgtcagaatttttggcttcgctccccgaactcggcgaaagcacgctatatgacgacatcgctcaagcttttggtgccaccacaccaagtactcgcgcgatggccattgagcttgctttggaaggtctttacctttcccgaaaaattgccaaggattctggcgaaggtgaaaccatttacggttaactggttttaaggagcaccacagccatg

SEQ ID NO: 246 - protein, 477 aa, Corynebacterium glutamicum
MTCSIPVRKIPDRPLKKRSRVWGVSLPPNVQTVGELKAAGHIYRPLRVEIRDNLLAKLRSGEDPWPGLHGLNYTVIPQLERALIAGHDIVLLGERGQGKTRLLRTLITLLDEWSPIIPGRDVPEHPLAPNVEISDDQPIEWVHRDARYTEKLATPDTSVADLIGDVDPMRVAEGRSLGDLETIHYGLIPRANRGIVAINELPDLAERIQVAMLNVMEERDVQIRGYNIRLDLDVLVVASANPEDYTNRGRIITPLKDRFGAEIRTHYPLELDDEVAIIRQEAELVAQVPDILVEILARYTRALRESSSVNQRSGVSARFSIAGAETVAAAALRRAAVFGEDEAVARLVDLEAAVEVLGGKIEFESGEEGREWEILDYLLRTATAEALRSTLRSLDLTPLIAALDGSITVSTGTNITASEFLASLPELGESTLYDDIAQAFGATTPSTRAMAIELALEGLYLSRKIAKDSGEGETIYG

SEQ ID NO: 247 - DNA, 472 bp, Corynebacterium glutamicum
  CDS (101)..(442): RXA02138
tcactcgccggagatccgtaaaaaggggagtacactgcaagcctatgatgtcccggcctaaaagtaattcaaagggccaacagttaaggagactaaagcgatgaccgctccatcaaccaacaccggtgttatcttgaccgagtccgcagcgtccaaagctaaggcactcatcgatcaggaaggccgcgacgacctctctctgcgtatcgccgttcagcctggcggctgctctggccttcgttaccagctttacttcgacgaccgcacccttgatggcgataaggaagacatcgtcggtggcgttcgccttgtcgttgacaagatgagcaccccatacttgctcggcgctcagatcgacttcgctgacaccatcgagcagcagggcttcaccatcgacaacccaaacgcaggcagctcttgcgcttgtggtgactccttcaactaaagagattccgttatgtaggaataaagg

SEQ ID NO: 248 - protein, 114 aa, Corynebacterium glutamicum
MTAPSTNTGVILTESAASKAKALIDQEGRDDLSLRIAVQPGGCSGLRYQLYFDDRTLDGDKEDIVGGVRLVVDKMSTPYLLGAQIDFADTIEQQGFTIDNPNAGSSCACGDSFN

SEQ ID NO: 249 - DNA, 1381 bp, Corynebacterium glutamicum
  CDS (101)..(1351): RXA02151
ttcaagatttaactaattgttaatctttttggcatacatcgagtcggacggttgcgctgcgaaatgagcgcatcgtcttttttaggagttgtccgccaccgtgaaaactggaaacttaaacccagccccacagcaggtgacggctccccagaacaaggctcgtatggattggccagacatcgccaagggaatatccatcctaggtgtcgtgttactacacgtgtcgttggcaattccaggtggccaggacaccatgatgtcccacctgaacgcactgcttgatccacttcggatgccattattttttatggtgagtggattttttgcagttaaagttctgaatcaaagctttggtgaacttttccgcgggcgactgtggttctacctggttccatatttgctgtggactccagtgaatctttatctacaccgcctcgagggcacagtttttaccggtagagcaccgggaacatgggaatggtacagcggctcgatgctctcggccaccaatatgtactggttcctctacttcttggtcatcttcaacctatttttatgggcaacgagaaaactcccagcttgggcaattgtggcgttggtggcctcactgtggctacttatgccggcttatagcgagattgagattctacgcaagtccattatttacttgcctacattcctcattggcgcttacttccgcccactgatttcgcgttttgcagaagccgcaacaaggccaaaagcaatagtgtttgcagcggtcctttatgtctcgggacttgctttgggcgtgatctcaaatgggctgcgcgacagcgaaaaccatggcgcaagcgtgctgtggctgatgaacctccgcgatacttttgctcatgcactcggcggcaacctcactggattcgatatggatcaccttcctggaatgatcattcggattgtttccctgcctgcaggaattgtgttgtgcgtatggcttggccgaataaagccagtaggggagtttttgaaacttattggtaggcacacccttcccatctacattgggcatgcaacaggactatcgctgatttttggtttcggcttgcgctggaatttcatggagattgataacttctctgacagtttgtggcaccacaccaatacgtggatggtcatcgcgtttgcctgcgcgatgctcggcgggtacctgacctatctgatctcgcgagttccagtgctgggatggactcttgttccccctaaactgccagaaccagataaaactccagctaaagcacaagctgattctcacgttaaagctcagtctgcgaagcctatgaatgcttctacctcttctaagacgtacggtatataactgaagcataacctgtgtgattctgct

SEQ ID NO: 250 - protein, 417 aa, Corynebacterium glutamicum
VKTGNLNPAPQQVTAPQNKARMDWPDIAKGISILGVVLLHVSLAIPGGQDTMMSHLNALLDPLRMPLFFMVSGFFAVKVLNQSFGELFRGRLWFYLVPYLLWTPVNLYLHRLEGTVFTGRAPGTWEWYSGSMLSATNMYWFLYFLVIFNLFLWATRKLPAWAIVALVASLWLLMPAYSEIEILRKSIIYLPTFLIGAYFRPLISRFAEAATRPKAIVFAAVLYVSGLALGVISNGLRDSENHGASVLWLMNLRDTFAHALGGNLTGFDMDHLPGMIIRIVSLPAGIVLCVWLGRIKPVGEFLKLIGRHTLPIYIGHATGLSLIFGFGLRWNFMEIDNFSDSLWHHTNTWMVIAFACAMLGGYLTYLISRVPVLGWTLVPPKLPEPDKTPAKAQADSHVKAQSAKPMNASTSSKTYGI

SEQ ID NO: 251 - DNA, 1027 bp, Corynebacterium glutamicum
  CDS (101)..(997): RXA02163
cttgaccgaggtcagagcagtaattggctcggaaaagaaggaattcttcgaagatccagaagtcgttgaagccttcgccgaccacggctttgaagttaacgtggacaccgcaggatctcgtcggatcgccactgatgtggacttgagcccgtacgatttcgcgttcccatcctctgcaccagctgcgcagaagatctccgaagccaacaccacgacgggccgattcaccccattctattcgcctatggcggtagcaacattcggaaccatcaccgacatgttggaaaccaaggggatcgtgagcaatgtaggcggcaccgacaccatcgatttgggcgcgttgttgaatgaaacccaagccggaacccgctggagcgaacttagccccaactatcagtccaaccgcgtcgtgcagatttctaccaccgatgtgcgcacctctaactcggcggccatgtacctatcaatgatgtcctgggtgaaaaatggcggaaaaacggtgagcagcactgcggaagccgatgccatcatcccagagcttagccaactgttcgtgggccagggctataccgaaagcacctccgccggcccgtttgatgaatacctctcccaaggaatgggttctaaaccaatggtgatgatctacgaagcccagttcctcgcggaacaaaacaaggaaaactcacggatttccggcgatatggaactagtgtatccaagccccaccgtgtacagcacgcatacggtggttagcttgagtgacgtcggcgcggagatcggcgaactcctagaaaccgacgaaaccctgcagcagttggcagtcaaacacggttttaggccaaagaactccgcaatgatcgccgatgctggcatgaccgaccgcatgcccaacaacctcaatgtcattgatccgccggactatgacttcctagaacgactcattgatggcgtgggcgcatcgtacagtgccaccccagcagaagaggacacagatctatgaaaaatcttgtaaaaggtacagcgctgg

SEQ ID NO: 252 - protein, 299 aa, Corynebacterium glutamicum
VDTAGSRRIATDVDLSPYDFAFPSSAPAAQKISEANTTTGRFTPFYSPMAVATFGTITDMLETKGIVSNVGGTDTIDLGALLNETQAGTRWSELSPNYQSNRVVQISTTDVRTSNSAAMYLSMMSWVKNGGKTVSSTAEADAIIPELSQLFVGQGYTESTSAGPFDEYLSQGMGSKPMVMIYEAQFLAEQNKENSRISGDMELVYPSPTVYSTHTVVSLSDVGAEIGELLETDETLQQLAVKHGFRPKNSAMIADAGMTDRMPNNLNVIDPPDYDFLERLIDGVGASYSATPAEEDTDL

SEQ ID NO: 253 - DNA, 709 bp, Corynebacterium glutamicum
  CDS (101)..(679): RXA02185
caactccttggggtgaagccagacatccactggcagagcaactcctccgctctaacccgacagctaacctcgacggcgacaaatgagaggaaaacttttcatgggacgtcactccactaagactagctccgcgttcaccaagctcgcagcttccaccatcgctttcggtgctgctgcaaccatcatggctccttctgcatctgctgcacctgattccgactgggatcgcctcgcacagtgcgagtccggtggtaactgggcaatcaacaccggtaacggctaccacggtggtctgcagttctccgctagcacctgggctgcttacggcggccaggagttcgctacctacgcataccaggcaacccgtgagcagcagatcgctgttgcagagcgcaccttggctggtcagggctggggcgcatggcctgcttgctccgcttcccttggactgaactccgctccaacccagcgtgacctctccgctaccacctccaccccagagccagctgcagctgcaccagctgttgctgagtacaacgctcctgcagccaacatcgcagttggctccaccgacttgaacaccatcaagtccacctacggcgctgtcaccggcaccctcgctcagtacggcatcaccgttccagctgaggttgagtcttactacaacgctttcgtcggctaaatctagctgcactttttaaaagggagg

SEQ ID NO: 254 - protein, 193 aa, Corynebacterium glutamicum
MGRHSTKTSSAFTKLAASTIAFGAAATIMAPSASAAPDSDWDRLAQCESGGNWAINTGNGYHGGLQFSASTWAAYGGQEFATYAYQATREQQIAVAERTLAGQGWGAWPACSASLGLNSAPTQRDLSATTSTPEPAAAAPAVAEYNAPAANIAVGSTDLNTIKSTYGAVTGTLAQYGITVPAEVESYYNAFVG

SEQ ID NO: 255 - DNA, 328 bp, Corynebacterium glutamicum
  CDS (101)..(298): RXA02186
tccaaccaccccttgagggtggggatgggggagtcttttttcatgatgttgttaagtttaagccttgttgaggtgacttttgttcccagagtttgaaagaatgtatgacatggcaaacgtagagaagaagcacttcgtcgatccggcatggccggagcacaatccagctgacggacacgtcgttactgaactcatctccaaggtcgcaggcgcgtccagcccatggggcgatgacaaggaattcccagtttctgcagaagagaccggatacgttcacccgtacacccggatcaaccgctaagaaacttaaaaaagaggcaacccgttt

SEQ ID NO: 256 - protein, 66 aa, Corynebacterium glutamicum
MYDMANVEKKHFVDPAWPEHNPADGHVVTELISKVAGASSPWGDDKEFPVSAEETGYVHPYTRINR

SEQ ID NO: 257 - DNA, 508 bp, Corynebacterium glutamicum
  CDS (101)..(478): RXA02203
cgattcaaaagagttcaccgaggtaggaaacatcgtggtcgcagccattgatgccctcctgggcgtgcagctctaggaaatttcaggaacaatacatctcatgaccattcgcgccactttccagccttccgtagatgaattcatctccactctcgaagagtttgcaacaggttcataccttaaagaggacgaaaaggaattctgggacgaacctttcgatgtcaaggcacttccagatcttcgtttcatcttggaaaactaccttgattccctagataagctcggtgaagcaccagaccttgatgctgttaacgcctccgctcagtccacccttgatgagctggagaagttcaacacaaagcaccacggtgctgttgttgagcctgaagaaaaagaagagatcactaaattgatgtttgatgctgcaaagcagactggtgcagatgatctttctgcagaggctttccctgagtttgagtaaatttcagtagaagttttttagcgccat

SEQ ID NO: 258 - protein, 126 aa, Corynebacterium glutamicum
MTIRATFQPSVDEFISTLEEFATGSYLKEDEKEFWDEPFDVKALPDLRFILENYLDSLDKLGEAPDLDAVNASAQSTLDELEKFNTKHHGAVVEPEEKEEITKLMFDAAKQTGADDLSAEAFPEFE

SEQ ID NO: 259 - DNA, 1198 bp, Corynebacterium glutamicum
  CDS (101)..(1168): RXA02206
gccggcatcggcaccccagaacagctcagagatgattcggaggtgtccgctggagctgatcggcaggaactctgtgaggccttgaacgatggagagcacaatggtttgtacccagccaatattttcagttgcggcaggatctgctgctgcggctaggagggttatctcttcattcacccgatctaccgtactaccttatgacctcagtagtgtggtgggcgtgaaacagcgaatggtcggttcaagtggtttgcgggtatccaggctcggtttgggcacctcaacatggggctcgggcaccgagctggctgaggcaggcgatatctttaaggcgttcatcaattctggtggcacgcttatcgacgtctcccccaactacaccaccggcgtcgcggaagaaatgctcggcacgatgttggatgcggaagtctctcgttcggctgtcgtcatttcctccagcgcaggtgtcaaccccgctctgccgctcggccgacgtgtggattgctcccgccgcaatttgattgcccaattagatgtcaccctgcgggcattaaacactgactatttggatttgtggtctgtgggctattgggatgagggcaccccaccgcatgaggtggccgatactttggattacgccgtgcgcaccggccgagtccgatatgccggtgtccgaggatattccggttggcagttagcggtcacccacgctgcatccaatcatgcagcggcctccgcccgccccgtggtcgttgcacaaaatgaatacagcctgctggaacgccgcgcagaacaagaactcctccctgccacccaacacctaggtgtcggattctttgctggcgctccgctggggcaaggcgtgctgactgctaaataccgctccgaaattccccatgattccagagctgcatccacaggacgcgacgcagaagtccaaagctacctagataatcgaggccgcatcattgtcgatgctcttgatactgcagccaaaggattaggcattagccccgctgtcacagccaccacctgggtgcgtgatcgtcccggagtgacagctgtcatcgtgggcgctcgcacacatgaacagctgtcacatcttctcaaggcggaatcggtgactttgccaacaccaatcacacaagcccttgatgatgtctccctgtgacttggtccaattacattcactggtaat

SEQ ID NO: 260 - protein, 356 aa, Corynebacterium glutamicum
MVCTQPIFSVAAGSAAAARRVISSFTRSTVLPYDLSSVVGVKQRMVGSSGLRVSRLGLGTSTWGSGTELAEAGDIFKAFINSGGTLIDVSPNYTTGVAEEMLGTMLDAEVSRSAVVISSSAGVNPALPLGRRVDCSRRNLIAQLDVTLRALNTDYLDLWSVGYWDEGTPPHEVADTLDYAVRTGRVRYAGVRGYSGWQLAVTHAASNHAAASARPVVVAQNEYSLLERRAEQELLPATQHLGVGFFAGAPLGQGVLTAKYRSEIPHDSRAASTGRDAEVQSYLDNRGRIIVDALDTAAKGLGISPAVTATTWVRDRPGVTAVIVGARTHEQLSHLLKAESVTLPTPITQALDDVSL

SEQ ID NO: 261 - DNA, 802 bp, Corynebacterium glutamicum
  CDS (101)..(772): RXA02217
tccgcggccccaaatgggtatgggcgcttttgaccatcgtcaatggtgttggccccgctgcctactgggctttcggcaggaaaaactaagagttgttagggtggcgctcatgactaataaaacacgagctctactcattggtggccacggcaaggtggccctcctagcaacccccatgcttatcgacgcctcggtgcaggtcacttccatgtaccgcaatccggaccacaggtccgaaattgaggcgctgggcgccacaactttagagcgtgacgtcaccacactcagcgtggaggattgggcagatctgctcaaggacttcgacgtagtggtgtggagcgccggaaacggtggcaagaacggcgcggatgcaacttatgccattgatcgtgatgccgcgatcgcatccattgatggtgcagctagcctaggggagaaggcacctcgctacatcatggtgagctacattggatcctccacgcacaccattgatccttcagcatccttctacccatatgcagaatccaaaaaggccgctgatgagcacctaagctccaccaacctggattaccttatcctcgcaccagcagccttaactctggatgaagtcaatggcgttgaggtgatcgccgatacctacgaagcagccgcaggccgcaccacatcaagagtcctcgttgcggaagttatcaccgagttggtggttcgcgacttcccacaaacccgtgtgctgcctttcgtggatggcgaatcaccagtctcctcgattagttaagctttgggagttggtgctcagcaccat

SEQ ID NO: 262 - protein, 224 aa, Corynebacterium glutamicum
VALMTNKTRALLIGGHGKVALLATPMLIDASVQVTSMYRNPDHRSEIEALGATTLERDVTTLSVEDWADLLKDFDVVVWSAGNGGKNGADATYAIDRDAAIASIDGAASLGEKAPRYIMVSYIGSSTHTIDPSASFYPYAESKKAADEHLSSTNLDYLILAPAALTLDEVNGVEVIADTYEAAAGRTTSRVLVAEVITELVVRDFPQTRVLPFVDGESPVSSIS

SEQ ID NO: 263 - DNA, 1516 bp, Corynebacterium glutamicum
  CDS (101)..(1486): RXA02219
tcaggaacgcatgaagccagtggaaaaggaacagggcttggttattcgtatccagtctgaagccttgttcaacgcggttaatgagatctagggggtgcacatggatgatttttctgcatcgctaggttttactgaccgttcctcgaggggaattctggacaccatcgagatgattgagaagtatcgtcttgatattcgcaccgtgaccatgggaatcagcctgttggaatgcgcgcgtggctcgatggaagagaccgcgacggctgtttatgatcgcgtgacgtcacaggctgcacgtctggttgaggtttgtgaaggcattgagcgtgaattgggcattcccattgtgaataagcgcatctcggtgactccaattgccctggtgactgctggttgcagtggcgatcccgttgacgttgctcgagccttagataaggcagcaaaagatgtcggagtgaacttcatcggcgggtattcagcactggttgaaaaaggtggaaccacctccgatattcggctgatccgctccattcccgaggcattgagcacaaccgatgtggtgtgtggatccgtcaatgtggcgtcgtctcgcgcgggtatcaacatgaacgcagtcaatgagatgggcaaggtggtcaagcaagcagctgaattgaccaaagatcgctccgccatcgcatgtgcaaagctagtggtctttgccaattctgtgggcgataatccattcatggctggcgctttccacggcattgaggagccggattgtgtggtcagcgttggtgtctcaggaccaggcgtggttagtcgcgcgctgggcaatcttcaaggtgccacccttgatcaagtcgcagaagagatcaagaaagcggccttcaagatcactcgtactggacaactggttggtgcgatggcctcagaacgcctaggagttcctttcggcatcgttgatctttcgctcgctcccactgctgaagtgggcgattccgtggcaaatatccttgaggtcatgggtcttgaccaggtgggcacacatggcaccaccgcggcactcgcactgctcaacgacgcggtgaaaaagggtggcatgatggcctgctcacgtgtcggcggcttgtccggatccttcattccagtttctgaagataaaggcatgatcgatgcggttcgcacaggagcaatttctattgacaagctcgaagcgatgaccgcgatctgctcagttggtttggatatgattgcgatccctggcgacaccccggcggaaactatttcgggcatgatcgcggacgaagcagccatcggtgtgatgaatcataagactacagctgtgcgtgttattcctgttccaggaactgtccctggcgatgaggtagatttcggtggcttgctgggttacgcgccggtcattccagtaaataccgtgggaaatagtgagtttattcaccgcggcggcttcattccagcacccgttcacgggtttagaaactaggagatccggggcctttacctgccattt

SEQ ID NO: 264 - protein, 462 aa, Corynebacterium glutamicum
MDDFSASLGFTDRSSRGILDTIEMIEKYRLDIRTVTMGISLLECARGSMEETATAVYDRVTSQAARLVEVCEGIERELGIPIVNKRISVTPIALVTAGCSGDPVDVARALDKAAKDVGVNFIGGYSALVEKGGTTSDIRLIRSIPEALSTTDVVCGSVNVASSRAGINMNAVNEMGKVVKQAAELTKDRSAIACAKLVVFANSVGDNPFMAGAFHGIEEPDCVVSVGVSGPGVVSRALGNLQGATLDQVAEEIKKAAFKITRTGQLVGAMASERLGVPFGIVDLSLAPTAEVGDSVANILEVMGLDQVGTHGTTAALALLNDAVKKGGMMACSRVGGLSGSFIPVSEDKGMIDAVRTGAISIDKLEAMTAICSVGLDMIAIPGDTPAETISGMIADEAAIGVMNHKTTAVRVIPVPGTVPGDEVDFGGLLGYAPVIPVNTVGNSEFIHRGGFIPAPVHGFRN

SEQ ID NO: 265 - DNA, 1492 bp, Corynebacterium glutamicum
  CDS (101)..(1462): RXA02221
ttcaatgatatttgctctgatttttggttctcgtctaatttcattattttgtcacgccagccatcacgacttcatacccaccaattgaaagtaaagtccaatgtttaccgcatccattcctacttatgaattagggtctttcagcaagggctcctacgttgagatcaaaggaacttacttctaccctgacacgctaaatactttatttagaaattctggggcaaaagacaacgaagagttctttgtagacgtaactcttgttccagaaccagataatccgcatagcactcgaggccatgccatttcagtccgctggaatgatctcgtaataggacatattgcctcggatatgactgaaaaattccaacaagtgcgacgagttgcagctagtggctacgatgctcgagtctctgctcggatttggacgaatacaaactataagaatgaacgagatttttgggtatctgttaagctccccgatccagatttccttgttcctcttaatgatcctccccatgacgggtttaccctcctcccttatggaacagcaatccaagtcaccaaggaatctgatcacatggacgtgctctcagaattcgtgcctccatctggacaaggtcagattctcgtatcgctacacatcattaacgcaggcgtgagaaaagaatgggatggcattgaagttcggctcgataatcaacggatcggagagcttacaaaggccagttcagaaaaattcgcacccgtagtgcgacatttcgatgacctaggacttagtacactatgtcgtgcgctcatcaaggggtcatcactagctgctgaagtaactctatatggagctcgtgcacatgagctttccgaagaagacttagaacctaaaagctcttccccattgcccaggttggttgaataccagtcaaatccgtttaattatcaagtccccaacaggtggcccggcgagcagaatcaacgtgctcctaagtcgcaaaagtcttcttcatcacctttcgcagcgtatcgcgggccatcgcaacctagtaaatcactcacaccgtttgtagcgcagacacctgcgcctcagcctagtgatcgatttattgattgggattcattgcttcaaccggacggaactccaagagctacgccattccaaagaggagtaacccgcgggttaattggcaagcatttttcgaatcaaaaatctccaagaattgactttgcaacggtggggcaatgtgatgcaattctccgaactttcggagagccgaccgacaagctttataaagacggcaggacttcttggcctttgtggtgggcgctcatggcgatagtcacccttctcgtcatgttgctgaactttattccaggaattggtccgatcttcccacttatcggattgatcgtacttggtcatcacttttggactcgccgaaaacttaacccaccattcggtagatcaaaatagatattctcatcaaatatcgctgatgca

SEQ ID NO: 266 - protein, 454 aa, Corynebacterium glutamicum
MFTASIPTYELGSFSKGSYVEIKGTYFYPDTLNTLFRNSGAKDNEEFFVDVTLVPEPDNPHSTRGHAISVRWNDLVIGHIASDMTEKFQQVRRVAASGYDARVSARIWTNTNYKNERDFWVSVKLPDPDFLVPLNDPPHDGFTLLPYGTAIQVTKESDHMDVLSEFVPPSGQGQILVSLHIINAGVRKEWDGIEVRLDNQRIGELTKASSEKFAPVVRHFDDLGLSTLCRALIKGSSLAAEVTLYGARAHELSEEDLEPKSSSPLPRLVEYQSNPFNYQVPNRWPGEQNQRAPKSQKSSSSPFAAYRGPSQPSKSLTPFVAQTPAPQPSDRFIDWDSLLQPDGTPRATPFQRGVTRGLIGKHFSNQKSPRIDFATVGQCDAILRTFGEPTDKLYKDGRTSWPLWWALMAIVTLLVMLLNFIPGIGPIFPLIGLIVLGHHFWTRRKLNPPFGRSK

SEQ ID NO: 267 - DNA, 1003 bp, Corynebacterium glutamicum
  CDS (101)..(973): RXA02267
tgcgctcggcaagtgttttgcttatcgacgtctccccacataacaatcccaactcgaagcaccaacgattcaagccttatcagttttgtacaggaaaatagtgcaaaaatggggtttaagcttcgtggagaggattgtcatcatgaacaacgtgcaacagtttcatcgattttttgatgattccgcagtctattatccctgcttcgtcccgcttgaccgagccatcggcgaacactttgatcgtcagaacaaaccgatgtccagattcatcggaacgctcattctgccgttagccaaactggaagaagccgcccaatacaccggcgatgaagtccttcgcgtgtcggcagtaatcagtactgatgggctcgctgatctgcgaagggatttttacgaactccccaacatcgacatcgcctcggtggaaatcaagctggtcggcgcagccctcaccaacaccgcttggttgggagatgtggaaaaactcatccaacaacatcgcaacactttcgtatgggttgagattccgacagccctggtcaccgcagatattgtccgaaaactccgccacatgggagctggcctgaaatacagaactggaggtgatagggaagagctcttcccctcaccgcaggacttggtcactgtgctgcgcaccgccatcgatgctgcattgccgtttaaactcactgcaggcctgcatcgtgctctcaggtatcgtgacgagaaaaccggccgacttcacttcggattcctcaacattgcagccgccgtggcgacacttcgtgctggaaaaggcgaggcagaggcactgaagatccttgaaggcgatgatgccgctccgcttattcacgcactacaaagcggcgaaaactggcgggattccttccgcagcttcagtacctgcaatgttgttgaaccactcaacactctgattgatcttgatgtgttggcggaaggagacgtacatccctaaggatcgacgctagttagatcggttttt

SEQ ID NO: 268 - protein, 291 aa, Corynebacterium glutamicum
VQKWGLSFVERIVIMNNVQQFHRFFDDSAVYYPCFVPLDRAIGEHFDRQNKPMSRFIGTLILPLAKLEEAAQYTGDEVLRVSAVISTDGLADLRRDFYELPNIDIASVEIKLVGAALTNTAWLGDVEKLIQQHRNTFVWVEIPTALVTADIVRKLRHMGAGLKYRTGGDREELFPSPQDLVTVLRTAIDAALPFKLTAGLHRALRYRDEKTGRLHFGFLNIAAAVATLRAGKGEAEALKILEGDDAAPLIHALQSGENWRDSFRSFSTCNVVEPLNTLIDLDVLAEGDVHP

SEQ ID NO: 269 - DNA, 688 bp, Corynebacterium glutamicum
  CDS (101)..(658): RXA02271
cactcccctatcctaagccacatctcggtttattaaactgttagtgaattctcacccgcaacactggtgtatttcagttacatccgtatggttattggttatgagctttcttaactctgcaaaaaccaagaccgtagccctcaccgcaaccttcgttggtgcagcaacccttgcaactcctgcaatcgcatccgctgacatcgtcgacaacgccctcgcagccctcccatccggtgagatcagctgctcccaggctgaaaagtactggaccaccgaagctgattacaacagcaaggttgcacaggccaacgccttggcaatgtttgactcccgcggcccacagatccaggcagctctcgcacgcgttgacgaagcagcaaaccgctgcggactcaagggcggcaccgtagctgcgcaggctgaggcaactgaggctgcgcctgccgctccagcacctgcaccgcaggataacaccggcacttctcagactgcccctgccccagcagcaccagcagcaccagcagctacccctgtggttaaccttgcacctgcaggatcaccaactttcaccattgaagttccaggagttggcggggttcagctgccagatctataccaaatcgtccaacagttcttggcacagttcggaatcaagatctaaatctattcacatcccttaaccctcacg

SEQ ID NO: 270 - protein, 186 aa, Corynebacterium glutamicum
MSFLNSAKTKTVALTATFVGAATLATPAIASADIVDNALAALPSGEISCSQAEKYWTTEADYNSKVAQANALAMFDSRGPQIQAALARVDEAANRCGLKGGTVAAQAEATEAAPAAPAPAPQDNTGTSQTAPAPAAPAAPAATPVVNLAPAGSPTFTIEVPGVGGVQLPDLYQIVQQFLAQFGIKI

SEQ ID NO: 271 - DNA, 1984 bp, Corynebacterium glutamicum
  CDS (101)..(1954): RXA02280
ggtcgaggtgtcgtagatgtcaatgagcttcgcgattgcgtcatcgatcgttgttgcttccatgcgcaccacactatctttctgcacgccctgatgccctgtggattcaaaactgtgcttttataggcgtatgcaagaatcctcacgtgataatttccaagttgacctcggcggcgttgttgatcttttgagtcgccacatttattccggtccgagggtgtatgtgcgtgagttgctgcagaatgcggttgatgcttgtactgcacgttctgaacagggtgaggagggctacgagccgagtattcgtattcggccggtgaccaaggatcgtgccacgttttcactggttgataatggtacgggcctgaccgcgcaggaggcgcgggaattgctggcgacggtggggcggacgtcgaaacgcgatgaattcggtctgcagcgggaaggtcgcctggggcaatttggcatcgggctgcttagttgtttcatggtggcggatgagatcaccatggtgtcgcatgcggagggtgcgtcggcgattcggtggactggtcatgcggatggcacctttaacctggagattcttggggatgacgcaacggatgtcattccggtgggcacgactgtgcacctgactccgcgccctgatgagcgcacgttgctgacggaaaattccgtggtcaccattgctagtaattatggccgctacctgccgattcctattgtggtgcagggtgagaaaaacaccaccatcactacatcgccggtgtttgcaaaggatactgatcagcagcacaggctgtatgccggccgggagcgccttggtaaaactccttttgatgtcatcgatctcaccggtcctggcatcgagggtgtggcttatgtattgccggaggcccaggctccgcatatgtccaggcgtcacagtatttatgtcaaccgcatgttggtctctgatgggccttccacggtgctgcccaactgggcgttctttgtggaatgtgaaatcaattcaaccgatttggaacccaccgcatcgcgtgaagcgctcatggatgacaccgcgttcgcggcaaccagggaacatatcggtgagtgcattaaatcgtggctgattaatctcgccatgaccaagcctcaccgcgtgcgggaatttactgcgattcatgatcttgccctgcgcgagctgtgccaatcggacgcggacctggctgaaaccatgttgggtcttctcaccttggagacctcccgtggtcgcatctcgatcggtgagatcaccacgttgtccatcaccgaggatgtgtcgctgcagctggctaccacgttggatgatttcaggcagctcaacaccattgcgcgcccggacaccttgattattaatggcggctacattcacgacagcgatctggctcggctcattcccgttcactacccaccgcttacggtatctactgctgacctgcgcgaatccatggatctgatggagcttccgccgctgcaggacattgagaaagccaaggcactggatgcgcaggtcacggaatcattgaaggattttcagatcaagggcgcaacgagggtttttgaacccgcagatgttcctgccgtggtgatcattgattccaaggcgcaggcctcacgggatcgcaatgaaacacaaagcgcaaccactgatcgttgggctgacattttggcaacggtggataacacgttgagccgtcaaacagccaacattccacaggatcagggactgtcggcgttgtgcttgaattggaacaattcgctggtcaggaaattggcgtccactgatgacaccgccgtggtgtcgcgcacggtgcgtttgctctacgttcaggcattgttgtccagcaagaggccactgcgggtgaaggaacgcgcgctgcttaatgattcgctggcagatctggtttctttgtctttgtcatccgatatctaagacaatcctccgctaatctcgagggca

SEQ ID NO: 272 - protein, 618 aa, Corynebacterium glutamicum
VDSKLCFYRRMQESSRDNFQVDLGGVVDLLSRHIYSGPRVYVRELLQNAVDACTARSEQGEEGYEPSIRIRPVTKDRATFSLVDNGTGLTAQEARELLATVGRTSKRDEFGLQREGRLGQFGIGLLSCFMVADEITMVSHAEGASAIRWTGHADGTFNLEILGDDATDVIPVGTTVHLTPRPDERTLLTENSVVTIASNYGRYLPIPIVVQGEKNTTITTSPVFAKDTDQQHRLYAGRERLGKTPFDVIDLTGPGIEGVAYVLPEAQAPHMSRRHSIYVNRMLVSDGPSTVLPNWAFFVECEINSTDLEPTASREALMDDTAFAATREHIGECIKSWLINLAMTKPHRVREFTAIHDLALRELCQSDADLAETMLGLLTLETSRGRISIGEITTLSITEDVSLQLATTLDDFRQLNTIARPDTLIINGGYIHDSDLARLIPVHYPPLTVSTADLRESMDLMELPPLQDIEKAKALDAQVTESLKDFQIKGATRVFEPADVPAVVIIDSKAQASRDRNETQSATTDRWADILATVDNTLSRQTANIPQDQGLSALCLNWNNSLVRKLASTDDTAVVSRTVRLLYVQALLSSKRPLRVKERALLNDSLADLVSLSLSSDI

SEQ ID NO: 273 - DNA, 514 bp, Corynebacterium glutamicum
  CDS (101)..(484): RXA02294
atgagcgtctacctcacctggcaacaaatccaaggaatgtagataagtcggggcaaactctaagaaatcatcctggtttgtggcagggaacattcctaggatgggaggcatggcaaagacaaaactagaaagcatctccgagcgcaactcggatgatccgcttagttaccccgacctgactcttgcaccaatatccacaacagtcacagtcgtggtcgccgaagacaccccaaacgataacttctcagaacttctcctcggcgcagcagaatcaacccgtcttttaggactcgacgagctccacatcatcgctccatcagtccacctacccgctctcgcagtagcagccgccgacatcgcacaccatctgccagagaaattccaattctgtgaagccgaaacctgcactcatctccaccccgacgatgacacctatctcacggctgaatccgttgctcaattgggtacgaagctgaagtctgcgtagttgttaggagccaccacagacccgtag

SEQ ID NO: 274 - protein, 128 aa, Corynebacterium glutamicum
MGGMAKTKLESISERNSDDPLSYPDLTLAPISTTVTVVVAEDTPNDNFSELLLGAAESTRLLGLDELHIIAPSVHLPALAVAAADIAHHLPEKFQFCEAETCTHLHPDDDTYLTAESVAQLGTKLKSA

SEQ ID NO: 275 - DNA, 910 bp, Corynebacterium glutamicum
  CDS (101)..(880): RXA02295
ttcccatgctaatccgcgaaaatggcacttcaacagccatatactttaaacaacacaaatgatgcaagactgataccgggatgtgataggagcgcaccacatggggttggaattagcagctagcgggtggggcatcctcatcgcaggcgccgccgtagccggatggatcgacgcagtaatcggcggtggcggactcgtcctcatcccgctgatcctcgcggtcatgccgcaactcgcacctgtgacagcgctggcctccaacaaactggcagccgtcaccggcacggcatcggcggcattcaccctggtcaggcgcgtcaaacccgacaaaaaactgcttgcgctctacgttctggtggcagctgtgtgctccggtgcaggcgccctggctgcgagtctcattgacaaacaaatcatgcgaccgctgatcatcgtgttgatgctggtcgttggcctgatcgtggtgttcaaaccaaacttcggaaccggcgaaagcaaagccctgcccaccggatggaaacgctgggccgccatcgttgcagtcggactcatcgcagcctacgacggcatcttcggacccggaaccggcatgttcctcatcatggcgttcaccgcactgctctcccaaaatttcctgtcctccgcagccatggcgaaggtcgtaaacaccgcaacaaacctgggtgcgctaattgtattcatcatcggcggccacatgtggtggaccctaggactcgtgctggcagtcgccaatgtcgcaggcgcacaactcggtgcccgaacggtgcttggtggcggtaccaggctaattagatacgcactactaaccctggttgtcgtcatgagcgtctacctcacctggcaacaaatccaaggaatgtagataagtcggggcaaactctaagaaatc

SEQ ID NO: 276 - protein, 260 aa, Corynebacterium glutamicum
MGLELAASGWGILIAGAAVAGWIDAVIGGGGLVLIPLILAVMPQLAPVTALASNKLAAVTGTASAAFTLVRRVKPDKKLLALYVLVAAVCSGAGALAASLIDKQIMRPLIIVLMLVVGLIVVFKPNFGTGESKALPTGWKRWAAIVAVGLIAAYDGIFGPGTGMFLIMAFTALLSQNFLSSAAMAKVVNTATNLGALIVFIIGGHMWWTLGLVLAVANVAGAQLGARTVLGGGTRLIRYALLTLVVVMSVYLTWQQIQGM

SEQ ID NO: 277 - DNA, 619 bp, Corynebacterium glutamicum
  CDS (101)..(589): RXA02296
gcatcatttgtgttgtttaaagtatatggctgttgaagtgccattttcgcggattagcatgggaatcaccagtatttctggacggttaaggatgattcatatgcgtaatcaaacaatcgctgcggtcgcagctttggtcctgctcaccgccgccacgcccgcgatcgctgccaccccggcgacagctggaaacggactctattccattgacatgggcgacgagcaaaagcttacctgcgtgcttttcgatgagccctccaccgaagcgcacgtcgtcgccagctgtgctgcgactttcccggtgacctggaagcttctcgacggcgctcacgaacaagccgcgaaacttgaaatcacccaggctcaagacggtgaactctcggtgacagccagcaagcagccgttgatcaccacgatgattgcgcccaccagcatcactaagcccatcactgtcaataggcttgtggttgttcctggtgagaatgaggttcgcttttatgctaccgatcctgatgttttaccagtgctgatcacgcctgactcctatgaagtgttgaccgattccgctgctaaagtgaaagcgacattatgaaataaacgtggatcaaggagtccggtg

SEQ ID NO: 278 - protein, 163 aa, Corynebacterium glutamicum
MRNQTIAAVAALVLLTAATPAIAATPATAGNGLYSIDMGDEQKLTCVLFDEPSTEAHVVASCAATFPVTWKLLDGAHEQAAKLEITQAQDGELSVTASKQPLITTMIAPTSITKPITVNRLVVVPGENEVRFYATDPDVLPVLITPDSYEVLTDSAAKVKATL

SEQ ID NO: 279 - DNA, 1789 bp, Corynebacterium glutamicum
  CDS (101)..(1759): RXA02298
aaatcatagcgtgagatgacaaggaaaggaatatttcgatccggcaacaacccccgcgtcaggtgggattatgccgaaaaaatcgctacgatagccacttatgactcttcagagttctgataaacgttctccttcactgttagacgcctcctccgaggtctttgtccatgatttggcagctttgtctcccactgatgccactgcatggggtatctcaggcttcgaaggtgatcttcaggatttctctcctgactattggaatgccatcgccgaacgcaaccgcgacatggttgccgatgttgatgcttttgatgacggcactgatgacaacgatgacgaagaagatttcgatgacgttgaccgcgtcaccgctgatgttctccgtgatcgcgtatgcctggatctggccctgcaccaccagggcgaaaccttagcgaatctcaacaacattgattccccagtccagaccatccgcgataccttcctcatcatgccccgcgagacggacgatgatgtggaaaatctccgcgaacgtctctcccgcgtccccgacgctctccacggatactgtgaatcactcgctgaggctgccagccaaggccatgttgcagcggtccgccaggtggaagaagtggtgtcgcaatgtgaggacctcgctgatgaggactccgttttgcagcaccttggcttggatgaaaatgatccagtagttgtagaggcccaggaagcttttgcacgagttgccggttggttagcagagcaactggctccgcatgctcctcatgtggatgcggttggccgggatcgctatgaaatgttctcccacctgcacgtcggcgagtttgtagatctggatgaggcttaccaatggtccctggaacagctgcgtgacattgatgctcagcagcttcaggtagcccagcagctgtacggccctggcaccacgatccgtgaggccatgaagaagctcaatgctgatgagcgctacctcatccgaggcactgatgctctgcaggagtggatgcaaaagaccgctgatcaggcaatcgctgatctagatggcgtttccttcaacattccagagcaggctcgacaggttgagtgcctcatcgatcctgctggaactggcggcattttctacaccccaccaagcgatgatttctccaggcctggccgcatgtggtggtctgtgcctaaaacccaggaagtcttccacacctggcaagagctcaccaccgtgttccacgagggtgttcctggccaccacctgcagatctcccaaactttggtggaaaaggatctgaacctgtggcgtcgagtcgcttgctggaactctggccacggtgaaggttgggcgctgtacgcagaatctctcatgaaggaattgggataccacgaagatccaggcaacctcatgggctaccttgatgctcagcgactccgtgcagcccgcgtggccattgacatcggaattcacctgaacaagaggaacccagagtgcaccggcctgtgggatgcgtcttatgcgcgcagcttcctgcgtgaaaatacgtccatgaatgaagatgcgctgtactttgagctcaaccgttaccttggttggccaggtcaggccgcatcgtatgccattggtcagcgactctggttgaacctgcgcgatgaggccattagccaggggcaaaccttggcgcaattccacagcaaggcattgtcctatggcagcatcccgatgggcattttgcgcgatcaggtgctgaactagaaggcctttaacgatccctacgcaaaa

SEQ ID NO: 280 - protein, 553 aa, Corynebacterium glutamicum
MTLQSSDKRSPSLLDASSEVFVHDLAALSPTDATAWGISGFEGDLQDFSPDYWNAIAERNRDMVADVDAFDDGTDDNDDEEDFDDVDRVTADVLRDRVCLDLALHHQGETLANLNNIDSPVQTIRDTFLIMPRETDDDVENLRERLSRVPDALHGYCESLAEAASQGHVAAVRQVEEVVSQCEDLADEDSVLQHLGLDENDPVVVEAQEAFARVAGWLAEQLAPHAPHVDAVGRDRYEMFSHLHVGEFVDLDEAYQWSLEQLRDIDAQQLQVAQQLYGPGTTIREAMKKLNADERYLIRGTDALQEWMQKTADQAIADLDGVSFNIPEQARQVECLIDPAGTGGIFYTPPSDDFSRPGRMWWSVPKTQEVFHTWQELTTVFHEGVPGHHLQISQTLVEKDLNLWRRVACWNSGHGEGWALYAESLMKELGYHEDPGNLMGYLDAQRLRAARVAIDIGIHLNKRNPECTGLWDASYARSFLRENTSMNEDALYFELNRYLGWPGQAASYAIGQRLWLNLRDEAISQGQTLAQFHSKALSYGSIPMGILRDQVLN

SEQ ID NO: 281 - DNA, 1009 bp, Corynebacterium glutamicum
  CDS (101)..(979): RXA02302
ggccaggttcggttagtgcgcgatctccctgatctctgactcatacatccaataagatccagacatatgcgaagctaatgaaggaaacgaggagctgatagtggcaacaaatcgtacatcttccgctggtgtcatcacgtctgttctcgcatccgctttgttcggagcgatctttttcatctctggggcgattgaggcaaaggcggaaacacttgttgcttggcgtgtccttctaacagcggcatgctatttgcttgcccttctgcaccctgctggtcggaaggtgtttaaggaattttgggacacactaaggtcccaacctcgtcaaattctgtactttatcttcctcgttgtactcatcacgcttcagctgtggctgttttcttggtcgcctaagagtcatgctttagatgcctcacttggttacctgttactgcccattttcctagtaattgtggggcggtttttcttcgctgattacatcaccaggctgcagtggattgcggtgggaatcgcgctgatcgcagtaaccttgaaatttgtcattagtgcgcaattatcgtgggtaacttttgccatcgctgcgggttatgcactgtattttgcgcttcgtaaatactcggggctgaacaacgcttttgcttacggcgcagaagttttagcgttaagtcccctggcatttttcatgctcgccactgtcgaggatccgctgtctaacgccatgttgtcaatggttattctggcgggcctcgctggcgcattagctatggcgttgtatctagccgcctcaactctgcttagtatgccgatgtttggcctgctcagttatggtgaaccaatcttgctgtttgttgcagcactattacttggtgaaacgttgaatctcagcgacgccattgtctactcactactggcgtgcgccctggcgttactgggatttgatgggatacgaaggtctcgaaaaaacctcgagaccgattaacttctgctcaacttcccaccaattaag

SEQ ID NO: 282 - protein, 293 aa, Corynebacterium glutamicum
VATNRTSSAGVITSVLASALFGAIFFISGAIEAKAETLVAWRVLLTAACYLLALLHPAGRKVFKEFWDTLRSQPRQILYFIFLVVLITLQLWLFSWSPKSHALDASLGYLLLPIFLVIVGRFFFADYITRLQWIAVGIALIAVTLKFVISAQLSWVTFAIAAGYALYFALRKYSGLNNAFAYGAEVLALSPLAFFMLATVEDPLSNAMLSMVILAGLAGALAMALYLAASTLLSMPMFGLLSYGEPILLFVAALLLGETLNLSDAIVYSLLACALALLGFDGIRRSRKNLETD

SEQ ID NO: 283 - DNA, 1036 bp, Corynebacterium glutamicum
  CDS (101)..(1006): RXA02303
gcccgggccgaaatcattccaatctcacccccacccaaaacactgttgatattttcactttccaaccagcgacgtgagcgcacgcactaaggttgtgcccatggctgaaaacaacaccccacaagaaactgaacaagatcaggaagcacgcttccgtgaggagttcgaggttggcggtaaggatcgtcagctttctgaagaagaacagctggagcagctcggatcgtatattgatgcgcactaccctgttccagatttcacgcccccttgggcaggtggcgccggcgatcctgatccagcagaccgctatattgcacatcttcccgatcgcaccacgcatactgcgatgatcatgttgggttctggccttgatcattccatgccgggtgtcgcatttatcggtggtgtgagcgtcgatgacgtcccggaggtcggaggcgcgattttccacccgtcgaatccgacgggccgctgggctgtatcgttccacagcggtggttggtggcgcggttccggtgatgcgttggagttccagtggcgtccagaggtcgcggcagctgcggaattgtccggcacaaccatccttgacctggactatccgctggccccaggccataacctccacgatatgaatgaggttgtgggcaaggcggtcggttacgcccgccaccataatccggtgtcgatcacgggttggggttattcctcgggcgcggcgttagccgcgattaatgcatcgcttttcgacgccctggtcctcacctttccggacctgggtagcgtcgagaagctccctgccgaaattcgtggagacgctgtagtgcccgcggcggctgcgtggccgacgacctttgtgcagatcgcggcgcaggatgagatcgcggagcggccaggagagcttggcgacgcgaccgtgaaggaatacgtttcccgccaccgtatttccacaccgaaggtcgcgcgcgaaaaaatcaccgacgtggcggagttccttaaaactgtttgctaatgtgccagcaggttgtaaataaacgct

SEQ ID NO: 284 - protein, 302 aa, Corynebacterium glutamicum
MAENNTPQETEQDQEARFREEFEVGGKDRQLSEEEQLEQLGSYIDAHYPVPDFTPPWAGGAGDPDPADRYIAHLPDRTTHTAMIMLGSGLDHSMPGVAFIGGVSVDDVPEVGGAIFHPSNPTGRWAVSFHSGGWWRGSGDALEFQWRPEVAAAAELSGTTILDLDYPLAPGHNLHDMNEVVGKAVGYARHHNPVSITGWGYSSGAALAAINASLFDALVLTFPDLGSVEKLPAEIRGDAVVPAAAAWPTTFVQIAAQDEIAERPGELGDATVKEYVSRHRISTPKVAREKITDVAEFLKTVC

SEQ ID NO: 285 - DNA, 544 bp, Corynebacterium glutamicum
  CDS (101)..(514): RXA02339
ttgagaaagccctctcgccgttcccaccgacaacctcttttcatatcctgcacaacgctatgatcttctcacacttgcctttgaagttaggattggggacatggttcaaattaatgacatgcttgcccctcctccagtaaaacttccggaagatcctgccctcggcgccgatccaactttgacctcgacagcgattgcgcatcctgacagcccattggtgtgggcgtaccgagctgaaaatcttatcaaatctgcatcaaatgatgaagagaagattcaggcctacgcttttgcgcgcacgggttaccaccgcagtctcgatcgtctgcgtgccaatggttggaagggttggggtcctgtccccttctctcatgagccaaaccagggagtgttgcgggctatcgcttccctagctcttgctgcgaagctgattggtgaggacaacgaatacgatcgttgccgccagatgctctctgatgcggatccagagtccgtcgcagtcctactcgacaaataaaccaccaaaaataaaacaatctccctc

SEQ ID NO: 286 - protein, 138 aa, Corynebacterium glutamicum
MVQINDMLAPPPVKLPEDPALGADPTLTSTAIAHPDSPLVWAYRAENLIKSASNDEEKIQAYAFARTGYHRSLDRLRANGWKGWGPVPFSHEPNQGVLRAIASLALAAKLIGEDNEYDRCRQMLSDADPESVAVLLDK

SEQ ID NO: 287 - DNA, 2563 bp, Corynebacterium glutamicum
  CDS (101)..(2533): RXA02360
aagtaactaaagttcgaaagtatttccgaacggtgtcggcctctgcgcatacactgtatttttaaagaaaattcttctcaattctaagggtgaatatccaatgcgtggtgacgttcaaaaaataaccaaggtttatgacggcaagcaccgaaccttggaaatcccggtttatcaacgcaattacgactggactgaaaagcaatgttcacgcctctttgatgacctcagcgaagtggtcaaagaaaaccaccgtcaacatttttttggagctgtggttggtaagcctcaaggcagctggacctgggttgtcatcgatggacagcagcgtcttacaacaatcagcttgttcatgcttgcgctggtacattccttgcgcgcatctgaagttgaagaaggtgagtttaatgctggctacaacattgatctagccacattgattgaggatgactacctccgatccggcaatgagggaaacctcaagttcaagctcaagccagttaaaaacgataatgaggcttatcaaaagctcttcggcccagaatctgaattcatagagtcctcaaacctcactgctaattatcgctacttccgcaatgtccttaaggcaaccgatctcaccgcagctcaactatgggaagctatcgagaaactcagggtcatgtatcttgaccttgaggaatttgatgatccgcagcgaatctttgaaagtctcaactccacgggattagagctcagtgaagctgataaggtacgcaacttggttcttatggatcaggagctcaaaacccaagaaaagctctatgagcagcgttggaatcccattgaagtctgcgtgaaatttgataccgacaatttcattcgctggtacttaactctcaaaaccgcgcgcaccccaagaaagcaagatgtttatgaggaattcaagaaattcatccgtaactccaagctcccggtcgaattcatcctcgacgatatgtacgagtacgcgaagctgtaccgagatctcttaggtgccactactgggtttatagctgccgataggtgtcttaagcgttttgtccctgtcatgggcgatgtggttttgccttttctgctgcctgttctcaaagatgctaaagacggcatcatcaccgaatcagacttcctcggagttctaaaagttctggaatcctatttattccgccgttttgcagtcggggttgctagtaacgccttaagcaagatcttctccactgcttatagcgacatcaagaaattctggactccagggcaaagttatagctcactgctggcctacattctgaaacgtcgcgatggttccgggcgttttccctccgacagtgaattccgtgagaacttcgcaaccaaaaatttctggaatattcataacgaaaacaggcgttacttatttgattgtctagaaaatgccgattccaatgatgttcgtgacatccaaacaagtctggatgaaggatctctctccattgaacacatcatgccacgtagcctaaacgatcagtggagagctgaactcggccctgaatatgctcgaattcatgagacttggattaatagaattggtaacctcaccatcaccggctacaactccgcctattcaaattcttcctatgagcgcaagcggacgatggaaaatggatttttggtatccccctatcgcatcaataatttcatcaaaaagcagaagcattggtctgaagaacagctaattgagcgaaccgagctgctcactcaagcagcgctggactactggccccttccaaaagaaaccttccagccaccacaagctgtgcttcctacagaatccttagatagtgatctttctttccgcggacgcgaaattgtcgcctttgaatatgaggactacaaggaaacggtaacgtcctgggcagacatgctccagagcgttctaaaagtcttgaaccaatccttccgccaggaactcatagctttgaccaatgaagaaatctgcctggcaacttcaaacaacagtaacagcagtctccgtgaaattgaccacgggctttttgtagacactggctctagtacgagtgtaaagattggcttcctccgcagagtttttactcaactggggctagagcaggaagcattggttttcacccttcgaccactggcaaatgatgtagaaccccgagatgatgaactcgaggtagaggtagaaaagaaatattccgatttgactaaattcatcccacagttagaagaagctgagaatctcgagggggcggatacagaggttattcctctcctctcaaagctcaaggaacaactgacagcctttagcccggagaatcctcaagcagccctagggggcctacctgttccagaattcctcaaacaaaatgtgattgaacaactaagcgcagagcacatccttgctgtactcactcaacactttaatatcgcatccatgatgggtgatgactatttgctcgaagagctcaggtcaggccgcttaagggaattactgcagcgtttagaggaattggatagctaatagccgtagtcggtggtcaaactttga

SEQ ID NO: 288 - protein, 811 aa, Corynebacterium glutamicum
MRGDVQKITKVYDGKHRTLEIPVYQRNYDWTEKQCSRLFDDLSEVVKENHRQHFFGAVVGKPQGSWTWVVIDGQQRLTTISLFMLALVHSLRASEVEEGEFNAGYNIDLATLIEDDYLRSGNEGNLKFKLKPVKNDNEAYQKLFGPESEFIESSNLTANYRYFRNVLKATDLTAAQLWEAIEKLRVMYLDLEEFDDPQRIFESLNSTGLELSEADKVRNLVLMDQELKTQEKLYEQRWNPIEVCVKFDTDNFIRWYLTLKTARTPRKQDVYEEFKKFIRNSKLPVEFILDDMYEYAKLYRDLLGATTGFIAADRCLKRFVPVMGDVVLPFLLPVLKDAKDGIITESDFLGVLKVLESYLFRRFAVGVASNALSKIFSTAYSDIKKFWTPGQSYSSLLAYILKRRDGSGRFPSDSEFRENFATKNFWNIHNENRRYLFDCLENADSNDVRDIQTSLDEGSLSIEHIMPRSLNDQWRAELGPEYARIHETWINRIGNLTITGYNSAYSNSSYERKRTMENGFLVSPYRINNFIKKQKHWSEEQLIERTELLTQAALDYWPLPKETFQPPQAVLPTESLDSDLSFRGREIVAFEYEDYKETVTSWADMLQSVLKVLNQSFRQELIALTNEEICLATSNNSNSSLREIDHGLFVDTGSSTSVKIGFLRRVFTQLGLEQEALVFTLRPLANDVEPRDDELEVEVEKKYSDLTKFIPQLEEAENLEGADTEVIPLLSKLKEQLTAFSPENPQAALGGLPVPEFLKQNVIEQLSAEHILAVLTQHFNIASMMGDDYLLEELRSGRLRELLQRLEELDS

SEQ ID NO: 289 - DNA, 3829 bp, Corynebacterium glutamicum
  CDS (101)..(3799): RXA02362
acaattgttcccattcgcatatctcgtgtccaccagagtcgctacagtaacgagaaacttaattatttgatccgattcttccgttcaaaggcctcattccgtgactatctctcgccgactcaaacaagagcgcagtttcgctgacgatcttcaagatctcaaaactctcaatgatcaactgcggtttacaaacgccaaattgcaagctcgcatcagtggtattggcaatgatggaaagaaaatcacgcgccctaccccactccttgcgctggattttcagctgaccgttgaagaatacgaaacgatcattgcaatcttggtggaagcagttggcggaaatcaatccaagccagcgattcttaaagatctgtttatagaatatccactcgtcttcctggcagcgctttctggaaccgccatgctcgatgctcaagaaggtttctggcctgcgttctggaaacgcactcaggtgtcagttccagagcatgtatacgacgcgatccgtaaagaactagttaatagcatccgcaaaaatggcctagaaactttttctctcgctgacctcaatcgacgcgaatatgtcggactcatccaacttcacagtggcctttctgcaaaagacatgctcgccttggtcaaatttatcgatcacactcgagcagaaaaccaaggatgggattctggtgaggactttgcatcatatgcgaagagtgtcttctcctccggggacaacctattaaccacggagtcgctcaagcaattagtcacccacatccctgcgcgttccgtcgacttcatcgccagagtctatgaactaaccaattggtaccgcgacctcaaagacctcaatgaagtagaagccttcgtaggtactcatgggctgccggaattgtctttcaaatttcttctggagtgtctgagcggcgaagctgaacaaattgccgaaaagacgaaagcagcaccagcaagcctggaaaacctggaacctccgcatctctatctggatccacagagttttgaactcagtcttgttttcccagcgatctctaaaactgcagcacttcagattccagcaccagaatggacagtgatttatgacggaaactccattaaagttcgtcccgaacaggactggtcctacggaggtttcgccgaataccgtttgcctttagacaaaccgctctccagcttgagagtcatcactccaacagagaaatccctaattctgattgaaggatttggccacaagaatcccattatgttctttaagaacaacggtcagccatatgcaaaccaagaaatgctcagtggcaacgctgtcacagctatagtcccagctgcagcaatcattcgtgcacgtatgcgagcttccaagactttcaactatcaagacttgggtcccttgtccggatggaacaagtgggtcattcgttcgatcccactcaaacgagctgaatcgatcacagtctcccacggtggcttcagaaaagaactcccagttcgacgcaaagttgatgttcaatggattactgaggatctcacgatcgagaatcttcaaggtctcgatcatgagcccgttttccacacgagtccccgcatcgaattccccacctctggatcaaactgggtaattcagtattcacagattcttccagatggcagcctcatcgaaatggaagattacccagtcgaacctgaaaacttcggatacgaactagacctcttcgaagaatccgacgacccttgggtcgggcaatttttagtaactctgctcaaggatgaaaaagtctatgaaacccgcaaattcaatctcgcggaaggcctcgatctttccctaacattcagcggaggcggacctgaaaatcgatttaggtaccccagcatcaatcagggacaaactggcttaacaaagactttcgcccgttttagttccaattctgaaaagcacatcaggttcccagatgagatcatcgggcttgatgcattcacctctcaaaaagcgtttaacatcgcaagcggtgatttccctgaggactacaacctcgacgttttcatcacgcctccgcaacttcactaccaagtacctgtcacacacagccaaacaaagtgggaaagcacaaagacgacactagatttcaatgactttgccgatggaaacctccagatcagattccctaatgaagtctatgatccaaacttgaaaatcattaaaatggtggcatacaagaaacctgagtccagtgagcctaaatacttaagcaaaattggttcaagcaaagtgtggtctatccctatggatcgcatcaaggaactcatggatgatgatgcccaattccttttgatcgcggagtggttcgctgaaagtaaagaccagcaccgagagaagatcattagcgaagctaagcgaactggaaaaatctccaatgcagcgcttaagagtgctcgtcctcaacctcaagcaagttcccacattgcaacaattgagaaaaagcccctactagctgcggctgaaattaagctttctaccgtggagttggaacttggtcggcacacttctaagagactggaaggctgggcatggtctgcgctcaacccgcttgatccaccaatcaaagtcgatttccaaggaacctcaggctcacttccagacacccacttcgtcgttggccctttaatcgtggaagtgagagaaaaagagtttctctcccaatggcagccaaaagttccctcagttaaagccgtggttgcaaatgatccctcatttgaattggaccctcaatttgatcctttcctcacacaccgatggatgttcgctccacgaagtgggaaggtcttactcccacaagaaatccgcacagtgtgggacgcccgattcaatatgcgccatgtcttagcgcagcgtgaaaaccttcatgtgaaatcgattcaagattttgacgatgccaccagtacctatctcaccagtgatcctcgggtggcattagatgaattggataagagctcaattccgtctaattcccactttgaatcattcatccgatccggattagctgagctttctttcgaagttgacgacacagccggagatatccatcgcgttccctggatcggcctgatccaggaaatgaacgacctcagaattctgcagatacaaggctatgaaacagaagaacgagccatcgaacgccgaaattcgcagagctacatccgtgagataggaggcagtgaattgtggaatatcctaaaaggaaattcagagggattgtctcttgctcaaaaatgcgcaccacaagccactgagattaatgtgattcgtaattcaggcttggaagctatgcgcaatgggctgggcgccgatcagttcagcgccgagtttatttcagcagactcacgcctacgagctcagcttgaatggttggaaaaccgccgagagctcaatgatctcggccagctcccaacgctcttcgatttcgccgagaaatacgagtacctcatcgatcacttaggtgatgatcgcatcaaggtcactgcacgtgagctgtctactcttgcgtcggaacaccgtcgcggcaacgctgaaaactggctttatgcaccatatgtgtcattcatttacagcttgcttaaccgaatgatcgctcatgaagtaatacgtccgatcgctcagatcaattactcacggcacgattgggcaaacgctgctcggctgattcctcgtctcacaggatttgacctggtgagtgccgaagcgaaagtgctcagcgcaataaacaacaacaatataatcccaactgcaatttaaggatcactatgtccaacgcacctaaaa

SEQ ID NO: 290 - protein, 1233 aa, Corynebacterium glutamicum
VTISRRLKQERSFADDLQDLKTLNDQLRFTNAKLQARISGIGNDGKKITRPTPLLALDFQLTVEEYETIIAILVEAVGGNQSKPAILKDLFIEYPLVFLAALSGTAMLDAQEGFWPAFWKRTQVSVPEHVYDAIRKELVNSIRKNGLETFSLADLNRREYVGLIQLHSGLSAKDMLALVKFIDHTRAENQGWDSGEDFASYAKSVFSSGDNLLTTESLKQLVTHIPARSVDFIARVYELTNWYRDLKDLNEVEAFVGTHGLPELSFKFLLECLSGEAEQIAEKTKAAPASLENLEPPHLYLDPQSFELSLVFPAISKTAALQIPAPEWTVIYDGNSIKVRPEQDWSYGGFAEYRLPLDKPLSSLRVITPTEKSLILIEGFGHKNPIMFFKNNGQPYANQEMLSGNAVTAIVPAAAIIRARMRASKTFNYQDLGPLSGWNKWVIRSIPLKRAESITVSHGGFRKELPVRRKVDVQWITEDLTIENLQGLDHEPVFHTSPRIEFPTSGSNWVIQYSQILPDGSLIEMEDYPVEPENFGYELDLFEESDDPWVGQFLVTLLKDEKVYETRKFNLAEGLDLSLTFSGGGPENRFRYPSINQGQTGLTKTFARFSSNSEKHIRFPDEIIGLDAFTSQKAFNIASGDFPEDYNLDVFITPPQLHYQVPVTHSQTKWESTKTTLDFNDFADGNLQIRFPNEVYDPNLKIIKMVAYKKPESSEPKYLSKIGSSKVWSIPMDRIKELMDDDAQFLLIAEWFAESKDQHREKIISEAKRTGKISNAALKSARPQPQASSHIATIEKKPLLAAAEIKLSTVELELGRHTSKRLEGWAWSALNPLDPPIKVDFQGTSGSLPDTHFVVGPLIVEVREKEFLSQWQPKVPSVKAVVANDPSFELDPQFDPFLTHRWMFAPRSGKVLLPQEIRTVWDARFNMRHVLAQRENLHVKSIQDFDDATSTYLTSDPRVALDELDKSSIPSNSHFESFIRSGLAELSFEVDDTAGDIHRVPWIGLIQEMNDLRILQIQGYETEERAIERRNSQSYIREIGGSELWNILKGNSEGLSLAQKCAPQATEINVIRNSGLEAMRNGLGADQFSAEFISADSRLRAQLEWLENRRELNDLGQLPTLFDFAEKYEYLIDHLGDDRIKVTARELSTLASEHRRGNAENWLYAPYVSFIYSLLNRMIAHEVIRPIAQINYSRHDWANAARLIPRLTGFDLVSAEAKVLSAINNNNIIPTAI

SEQ ID NO: 291 - DNA, 793 bp, Corynebacterium glutamicum
  CDS (101)..(763): RXA02367
ggatccaggaaaagtattcatcgaagtttccctgaaagggatctcagccatcaaggcacttgaatccggacgctaagttgttgatacatcaacttatttcttggctatacttgaggtcacgtttcctcagctcaggagaagttcggagaagtccatgtcaaacgcagaaattaatcccgttgaatatgaaatcaacaaccacgcccctggtaccgcgctaaacccacagtgcgaagacggcgccaacgtagaaatcatcacctcccgtgaagtccccctcggcggaccacgcgccatgaccgtgcaccgcacactcccccaacgccagcgctccctcatcggtgcctggtgttttgtggatcattacggccccgatgatgtctcactaaccggtggcatggatatggcctcccacccgcacaccggattgcaaacagtcacgtggctttttgaaggcgaagtcacccaccatgattccggcggaaatcacgcagtcgtgcttcctggcgaagtcaacctcatgaccgccggcgcaggcatctgtcacaccgaagtttccgccacctccaccacgattctgcatggtctgcagttgtggacagttcttcccgacaaagaccgcgaaggaccacgccgctttgatcactacgctccagaagaaatcacactcgaaggcggaagtgcacgcgttttcctaggttcgctatttggtcaaacctcccctgttcatacgtttactggctcttcctgttttagagtgcattgatcttatggaccaactgccctgaatgga

SEQ ID NO: 292 - protein, 221 aa, Corynebacterium glutamicum
LAILEVTFPQLRRSSEKSMSNAEINPVEYEINNHAPGTALNPQCEDGANVEIITSREVPLGGPRAMTVHRTLPQRQRSLIGAWCFVDHYGPDDVSLTGGMDMASHPHTGLQTVTWLFEGEVTHHDSGGNHAVVLPGEVNLMTAGAGICHTEVSATSTTILHGLQLWTVLPDKDREGPRRFDHYAPEEITLEGGSARVFLGSLFGQTSPVHTFTGSSCFRVH

SEQ ID NO: 293 - DNA, 1123 bp, Corynebacterium glutamicum
  CDS (101)..(1093): RXA02387
cagagaaggaatccctgtgctgtatccataccgcgatggggaggtcagccttcatattgatggcacccagcatgcagcggacgggagattttaacgacacttgtggcacgatggtcacgtggcttcagcacctatttcagttcaaccagcggtccatcttgttctcggcgaggatgagttccttgccgaacgcgcgcgtatcaacatcgtgcatgacatccgttcatcgatggctagccccgattcgcttcaggtcaccaccttgaaggccagcgaaattactcagggtgaattgttggatgcgttaagcccatccttgtttgctgaagaccgtgtggtggtgcttaccaacatggatcaagcaggccaagatgctgtagatctagccttatccgcagcagttgatcccagccctggtacctacttgatcgtcatgcactctggcggtggacgctctaagtcgatggtgaagaagctggaaaaagtcgcggtggtgcacgatgccgcaaagctgaaagaccgggatcgtccaggttgggtaaaacaagagttcaaaaaccacaaagtccaggtcaccccagatgtcattcatgctcttttagagggcgtgggttcagatcttagagagctggcgtccgccgtatcccaattggttgaggacacccaaggcaacgtgacggtggaaaaagtccgtgcctattacgtgggtgttgctgaggtatcgggtttcgacatcgccgattctgcatgcgccggtcaaatgtcaaaggccgtggccagcaccagacgtgcccttcaattgggtaccagcccggttgcattggcagctgcgttgagtatgaaagttggccagatcgccaggctgtattccaccaggggacgcatcaacggttttgagctggccaaagaattgggcatgccgccgttcgtggtggagaagactgcgaaagtggcccgaaactggtcgggagatgcggtcagcgaggccgtgattttgatggccgatctggatgccgctgtaaaaggacaaagtggcgatcctgaatttgccatcgaatctgccgtgagaagagttgcagagctggcgaggcggtaacgctgaacggcggcgggtaagatattt

SEQ ID NO: 294 - protein, 331 aa, Corynebacterium glutamicum
LWHDGHVASAPISVQPAVHLVLGEDEFLAERARINIVHDIRSSMASPDSLQVTTLKASEITQGELLDALSPSLFAEDRVVVLTNMDQAGQDAVDLALSAAVDPSPGTYLIVMHSGGGRSKSMVKKLEKVAVVHDAAKLKDRDRPGWVKQEFKNHKVQVTPDVIHALLEGVGSDLRELASAVSQLVEDTQGNVTVEKVRAYYVGVAEVSGFDIADSACAGQMSKAVASTRRALQLGTSPVALAAALSMKVGQIARLYSTRGRINGFELAKELGMPPFVVEKTAKVARNWSGDAVSEAVILMADLDAAVKGQSGDPEFAIESAVRRVAELARR

SEQ ID NO: 295 - DNA, 799 bp, Corynebacterium glutamicum
  CDS (101)..(769): RXA02390
gctggtggtgctgacccatacgctggaactccaactgctgttgataccgccaagatgtttggccgcgaggatctcgtagctcgcttcgagtcataggccggtggagtggaccgcttttggcaccctgattctgctcaatttggtgggcagtttatccccggggcctgatacctttttcctcctccgcttagccacccgctccagagcgcacgcgatcgctggcgtcgccggcatcgtcaccggactcacggtgtgggtgacgctgacggtcgtgggagcagcggcgctgctcaccacttatccgtcgattctcggaatcatccagctcgtcggcggcacgtacctaagcttcattgggtacaagttgctgcgctcggcgtcgagagagcttatcgacgcccgccagttccgtttcaacgccgatgcccgacctatcccggatgcggtagaagcactgggaacccgcactcaggtatatcgacaaggtttggccaccaacctgtcaaaccctaaagttgtcatgtacttcgcggcaattctggctccgttgatgccagcgcacccatcaccggtgctggcgttctctatcatcgtggcgattttagtgcagacctttgttaccttctctgctgtgtgcctcattgtctctacggagcgtgtgcgcaaagcaatgctgcgtgcaggtccctggtttgacctgcttgctggcgttgtcttcctcgttgtgggtgtgactctgctgtatgaaggcctgaccggtttactcgggtaaaggcataaaaaatggcttccaatcaaa

SEQ ID NO: 296 - protein, 223 aa, Corynebacterium glutamicum
VEWTAFGTLILLNLVGSLSPGPDTFFLLRLATRSRAHAIAGVAGIVTGLTVWVTLTVVGAAALLTTYPSILGIIQLVGGTYLSFIGYKLLRSASRELIDARQFRFNADARPIPDAVEALGTRTQVYRQGLATNLSNPKVVMYFAAILAPLMPAHPSPVLAFSIIVAILVQTFVTFSAVCLIVSTERVRKAMLRAGPWFDLLAGVVFLVVGVTLLYEGLTGLLG

SEQ ID NO: 297 - DNA, 2035 bp, Corynebacterium glutamicum
  CDS (101)..(2005): RXA02395
ttgcttataatacaaaaacaggaatatttaactcgacttcttaaaaaagctctatacgtaaatatcttgcccatccagcaccacctcattgtggtgcacaatggagaggacacacatgtccaccaactctggcaataacttgcctgaatcccaagagtcacccgaggaacctcattatcctcacgacacccacccaggcctagttcctggcatttcggtcgatgctcaacgcaacaagttcggactcgacaaaaccgttttcggcgtcaccgcagcattaattctggcgttcatcgcctggggcatttccagccctgattcggtttcttcagtatcgtccacgatgttcagttgggctatgacgaatactggttggctcctcaactttgtcatgctgatcggcattggcaccatgctctacatcgctttttcgcgctacggccgcatcaagctgggcacggacgaagacgaaccagaattctctcgcttttcctggattgcgatgatgttcggcgccggcatcggtgtcggtatcttcttcttcggtccttccgaaccgctgtggcattatctcagtcccccacctcacaccgtggaaggatctacacctgagtccttgcaccaagcacttgcgcagtcccacttccactggggcttatccgcctgggggctgtatgccttggtcggcggcgcgttggcgtactccagttaccgacgcggccgcgtaaccttgatcagctccaccttccggtcacttttcggtgagaaaaccgaaggtatcgcgggtcgcctcatcgacatgatggcgatcatcgccacgctgtttggaacggctgcaaccttgggcctttcagcaattcaggttggtcagggcgtgcagattatttctggcgcttcggaaatcaccaacaacatcttgatcgccatcatcgcgatcttgaccattggcttcatcatctcctcagtatctggcgtgtccaagggcattcgttatctttccaacctcaatatttccttgacgcttggattggtcctgtttgtgttcatcaccggccccaccttgttcctgctcaacttgatcccatcgagtgtgttggaatatggcagtgagttcttgtcaatggctggcaagtctttgtcgtggggtgaggaaaccattgaattccaagctggttggacggcgttctactgggcatggtggatcgcatggactccattcgtgggtatgttcatcgcgcgtatttctcgcggccgcaccttgcgtgaattcgcgctcatcaccatggctatcccctccttcattttgatcctggcgttcaccattttcggtggaactgccatcacgatgaaccgcgagaacgtagatggttttgacggcagttcatccaaggaacaggtgctgtttgatatgttcagcaaccttccgctgtactcgatcacaccgttcattttgatctttgtgctggcagtattctttgttacctctgccgattccgcctccgtggtgatgggaacgatgagctcccaaggtaaccctgcaccaaacaaattaatcgtggtgttctggggactgtgcatgatgggcatcgcggtggtcatgctgcttactggtggcgaatccgcgctgactggtctgcagaacctcaccattttgatcgccattccgtttgcgctggtgttgatcgtgatggctattgcctttattaaggacttatccacagacccagccgctattcgacaacgctatgcaaaggcagccatctctaacgcggtggttcgtggcttggaagaacacggcgacgacttcgagctctccatcgaacctgcagaggaaggtcgtggagcgggtgctaccttcgattccaccgctgatcacatcaccgactggtatcagcgcaccgacgaagaaggcaatgatgttgattatgacttcaccaccggcaaatgggccgatggttggacaccggaatcgaccgaagaaggcgaagtggacgcgaaaaaggattaaaaaataacgactggctgggattcacac

SEQ ID NO: 298 - protein, 635 aa, Corynebacterium glutamicum
MERTHMSTNSGNNLPESQESPEEPHYPHDTHPGLVPGISVDAQRNKFGLDKTVFGVTAALILAFIAWGISSPDSVSSVSSTMFSWAMTNTGWLLNFVMLIGIGTMLYIAFSRYGRIKLGTDEDEPEFSRFSWIAMMFGAGIGVGIFFFGPSEPLWHYLSPPPHTVEGSTPESLHQALAQSHFHWGLSAWGLYALVGGALAYSSYRRGRVTLISSTFRSLFGEKTEGIAGRLIDMMAIIATLFGTAATLGLSAIQVGQGVQIISGASEITNNILIAIIAILTIGFIISSVSGVSKGIRYLSNLNISLTLGLVLFVFITGPTLFLLNLIPSSVLEYGSEFLSMAGKSLSWGEETIEFQAGWTAFYWAWWIAWTPFVGMFIARISRGRTLREFALITMAIPSFILILAFTIFGGTAITMNRENVDGFDGSSSKEQVLFDMFSNLPLYSITPFILIFVLAVFFVTSADSASVVMGTMSSQGNPAPNKLIVVFWGLCMMGIAVVMLLTGGESALTGLQNLTILIAIPFALVLIVMAIAFIKDLSTDPAAIRQRYAKAAISNAVVRGLEEHGDDFELSIEPAEEGRGAGATFDSTADHITDWYQRTDEEGNDVDYDFTTGKWADGWTPESTEEGEVDAKKD

SEQ ID NO: 299 - DNA, 916 bp, Corynebacterium glutamicum
  CDS (101)..(886): RXA02425
gtatttatcagcgtctgtggactgcgtggagtgtcggaagatagttgactgttcaatgcgttgaacattagtattcatccctatggatacctcgactgtgttgttcgcatttggactcaccctatttgccggtcttgccaccggcatcggcggtctcatcgccgtagcgcgcaaaaccgtcaccgaaggattcctcgcaggatcactcggcttctctgtcggcgtgatgctgtacgtatcctttgtggaaattctacccggcgcctttgatgaattaaccagtgtttggggagaaaaaggcggaagttgggccgctgttatcggcttcttcggtggcatcgcgctgatcgccatcatcgaccgcttagtccccacggcgattaacccccacgagccctccaccgtgggaggcgccgttgaaggattcgagcgccgcaaccgcatgatgaaaatgggtgtgctcactgcgctggccatcgcgatccacaactttcccgaaggtttcgctacattcttggccggattgtccgatccaatgatcgcgatccctgtggccgtggcaattgccattcacaatattccagagggcattgcggtggcggtgccactgagggaagctacagggtcacgtcgaaaagcattaggttgggcgaccctctccggccttgctgagcccgccggcgccctcatcggattcctgctgctcatgccctttatcggaccagaagcactcggcctgtgcttcgccgcagttgccggcgtgatggtgttcatcagcgtcgatgaactactgcccactgccatctccagcggcaaacaccacaccgccatctacggactcatcgctggcatggcagtcatggcgatcagcctgctgctgtttatctagcgttcagccgcaacaagcatccggtca

SEQ ID NO: 300 - protein, 262 aa, Corynebacterium glutamicum
LFAFGLTLFAGLATGIGGLIAVARKTVTEGFLAGSLGFSVGVMLYVSFVEILPGAFDELTSVWGEKGGSWAAVIGFFGGIALIAIIDRLVPTAINPHEPSTVGGAVEGFERRNRMMKMGVLTALAIAIHNFPEGFATFLAGLSDPMIAIPVAVAIAIHNIPEGIAVAVPLREATGSRRKALGWATLSGLAEPAGALIGFLLLMPFIGPEALGLCFAAVAGVMVFISVDELLPTAISSGKHHTAIYGLIAGMAVMAISLLLFI

SEQ ID NO: 301 - DNA, 682 bp, Corynebacterium glutamicum
  CDS (101)..(652): RXA02433
atgctgatagatatttggtgaccagagattagagcaaaggatcattttcatcgtgaagcttttcaaggcaaccgcagttacttttactgttgcagcagcattggcgctcagcgcgtgctccagcagtgatgattcctcttcggagtcaagcacctcttcttccacctcttcggctgcgtctgatgctgcgactcagtacccaactgctgaggaactgaatgcaattttggctgtggcaaccgaccctgaggcaccaatcgaggagaaggtgaagactgttcagggttctgagaacgctcctgagctgtttgagaccatgactcaggcaaaggtggagtcgggtgctgagttccaggttgttggttctgtgcttcctggctatgacccaacctctgaggttctgaccaccgtcatgttccagcttccggaccgcgctgagcaggaagctgaaggcgtggagtttgtgaacactgatggtaattggcagctgtcccaggattgggcttgtatcttgatcaccaatactgttgctcctgagcaggttcctgcaatgtgtgttggaactgatgcttcttccgctggtattgaagaggccccagctgaagagggtgctgttgttgaggaagcccctgttgaagaggttcctgttcagtagggtttaacggctcaggctgattttctt

SEQ ID NO: 302 - protein, 184 aa, Corynebacterium glutamicum
LALSACSSSDDSSSESSTSSSTSSAASDAATQYPTAEELNAILAVATDPEAPIEEKVKTVQGSENAPELFETMTQAKVESGAEFQVVGSVLPGYDPTSEVLTTVMFQLPDRAEQEAEGVEFVNTDGNWQLSQDWACILITNTVAPEQVPAMCVGTDASSAGIEEAPAEEGAVVEEAPVEEVPVQ

SEQ ID NO: 303 - DNA, 766 bp, Corynebacterium glutamicum
  CDS (101)..(736): RXA02486
tccgacctcgtcgcattagccaaagaaatccgcgacggagtcctcgaaaccttcggcgtcaccctcgtcccagaacccgtctggattggaatcagcatcgatgactgaattttccgacgtccctggcaccgccgccccactgcacagggcgttggaaaatgccggatactccactttagaatccctcgacggtgttccctacaagacgttgattgccctgcatggtgtcggaaaaactggcctcggcaggatccaggcagcattgttggaacgtggcctttccctgggggaagaaacaaaaggcgccaccatcaccccaggtcacaccggtaaagtggcctcagatatcaaaactcacatcacttccgtggatcccgtcgcatacgtcgatggtctagaggggcgtcgggttgctcacgggcaccaattgctatcgatcttcggtcgcgtcaccggcgcggaacccaaaatgtggggaccctccatgatcggatacggctcagtccactacgtttcccacaccggaagggaaggcgattggtttcagtgtggtttcagcccggcgaagtccaaaatctgcctgtatggcctgaaggattcgcctcgcggtgaggaattgctgcagaaacttggaaaatacaccgaaggccgcggatgcgtgtacatcaataaaccggaagacatcgatttggatgttttagaggccatgatcagcgagtcatgggccggccaaggctaggttgcaaatccccaccacaagttgctc

SEQ ID NO: 304 - protein, 212 aa, Corynebacterium glutamicum
MTEFSDVPGTAAPLHRALENAGYSTLESLDGVPYKTLIALHGVGKTGLGRIQAALLERGLSLGEETKGATITPGHTGKVASDIKTHITSVDPVAYVDGLEGRRVAHGHQLLSIFGRVTGAEPKMWGPSMIGYGSVHYVSHTGREGDWFQCGFSPAKSKICLYGLKDSPRGEELLQKLGKYTEGRGCVYINKPEDIDLDVLEAMISESWAGQG

SEQ ID NO: 305 - DNA, 1087 bp, Corynebacterium glutamicum
  CDS (101)..(1057): RXA02488
taaggttaccctaccctctttggggtagggctcttccatttttgccaggttaggttaagctaatctagtttttattgcgttatcgaacaggagaacaaaaatgaacaagcttgccacccgtgcgctcgttgctctcacgggatccgccatcgccatgaccggcctcaccgtagtctcggctaatgcagccgagaaaaccggcaaatgccgcgttgtcaccaccacaggaaccgccgactggtcagtgcgtgaatcattcaacaactaccttgaaggtccaattgcaaacggtgcagcatacaaataccacggtggcatcgaggtccgtgacggtgtagaaaccaccggcacgaagtcagctcgcgagttcacctggccagtacttggcagcgaagaaggagccgtcaaacttggcggtggcgttcactggaccggacacaatcactactccggcgacgacgagtcccaggcgccagacaacttcatccttgatctcgacttctccaacccaaccgtcaaattcgatggcaacgagggcaccctgcttgtcgacttcaagtcccgtgagttcgttgataccaagaccgtcgctgacttcctcaccggaactcaggcagagttggctaccatcactttcgatgagccaatcgacctgacccaggagaacgtcaccgtcaccggccagaccaagctgactgcaactggtgtcgatgtcatgggcaccttctacccagaaggtgaagcacttgcgccaatcactttgaacctcaccaacgaagttgtatgcgacgagcctgaaacccccgttgagcctgaggttcctgtagagcctgagactccagtagatccggaaacctcggtcgacccagagactccagtagatccggaaacctcggtcgacccagaaaagcctggcgatgacaacaaggatgacggaagcaacagcagcagcaacggcgatatcctcggaatcttgggcatcctcgcagcgcttggtggcgttggtgcacttgtgtacaacttcctggtagctagcggattccttgcagcgtttaagtaaatgaatcgttttcctagtgccttatta

SEQ ID NO: 306 - protein, 319 aa, Corynebacterium glutamicum
MNKLATRALVALTGSAIAMTGLTVVSANAAEKTGKCRVVTTTGTADWSVRESFNNYLEGPIANGAAYKYHGGIEVRDGVETTGTKSAREFTWPVLGSEEGAVKLGGGVHWTGHNHYSGDDESQAPDNFILDLDFSNPTVKFDGNEGTLLVDFKSREFVDTKTVADFLTGTQAELATITFDEPIDLTQENVTVTGQTKLTATGVDVMGTFYPEGEALAPITLNLTNEVVCDEPETPVEPEVPVEPETPVDPETSVDPETPVDPETSVDPEKPGDDNKDDGSNSSSNGDILGILGILAALGGVGALVYNFLVASGFLAAFK

SEQ ID NO: 307 - DNA, 2716 bp, Corynebacterium glutamicum
  CDS (101)..(2686): RXA02495
aactttaaggagttcaccaaggaggaaaattatcaccgtcttaaaaacggctaaggcttttctaaattcgccgctgcgcaccatcacgtggcgcagcgttgtggcgaataaactccgcatggcattaacagtgctttcggttgtgctaggaaccgcatttttgtgtggctccctcctcctcacacattcccttgaaagaacattttcctccatcgttgatgccggcgtggagggcgttgacgtgggcgttatcgcgcaacaaaacaaccccgacggcgtacctttctccgtcatcgccgaaattgagcagtatccggaagtccgcgccgtcaacatcatcggcgacggccccggcatgccctccggcaccaccatgaccggccaatccgcgctgatcctcaccgactccgacggcaatcccctgcaagcaggcagctccggcacgcacccgctagccatttatccgcagggcgagtgggtctcgcccgagccaacgcttatcgacggccacttccccacaaaacccgacgaggtagtagtcaacgcttcggccgccaaacgtggcgggctctccctcggtgatcacctaacgatcgtcacacccaccgaacgcatcgacgccaccctgtctggaaccttcgaatcaaacaccgacgtcgcaggctgggtcggagtcggattcaccccacagcgctacgtcgaactgttcaccaacggcaccgacgccagccaaatcaccatcgcagtcaacgacggcgccgaccccatggcagtccgcaaccgcatcggcaaaaaccaccgcgacctcctgcccctgctgcccgagcaaatcatcgaccaaaccaccggcgacaccgcccgccaactggagttcatgacctacgtgctcctggcattcgccgcgatcgcactgattgttggctcgttcatcattgccaacaccttcgcgatgatcgtcgcccaacgcaccggcgaattcgccctcctccgttccattggtgtctccacgttccaaatcggattctccgtgattatggaagcagtattcgtcggacttatcggcggtttcatcggcatcgcagttggcttcggagtggtcaatgcacttgtccaagtgctcaaccaattcggcgacaccctctcctccatcgacatcacctacaacgccggatccttcatcttccctgtcctcttcgccgtcactgccaccgtactaagctccatatcgcctgctcaccgcgccggtaacctcccaccagtccaagcattcgaatcctccgatgcacgcagcgacgccctcggaaggatccgcttcctcgtcgccgccgtcatgctcacccttggaatcagcctgacgatcgcaggtgccgtggtatccgccatcaacggagatgaattcaaaacagaaacacgcctcgcattcatcggcgctggacttctcttagtgttcttctcactctccctgtccggtcccgcactgatggtggcgacctctcagactcttggcgtggcgataatgtcgccgttccgagccgtcggcaagctcgcacaacgcaacaccctgcgcaatccgcgacgctccgcaaccaccgcactggccgtcactttgagcgttggcctcgtcgcctgcgttggagtcatcggcgccaccacccgcgccagcgtcttcgggtccatggaatccaccatcaaatccccatatgtcctcgacagcatcggtggcaccatgatccctggacaacccgccggcggttcaaggtcactgtccatgtccgcagccgtcgcacaggaaatcgcacaaacccgcggagtcggcaaagtgggcaccctcatgaccggcagcgtccaagtcaacggatgggacaacgaaaacaccacaattttcgacggcgacctctctcagttcctcgacctcgcagtccgctccggcgacgccttcgacgacgaaacccccggcgtcatgatctccaccacctacgccgaccaatccgacctcgaagtaggcgacaccgtcaccgtcaacccctacggatccgacgacggcatccgcgtccccatcaccggcatctacgcagaaaccaacctcgtcggacacctcatggtcaacgcagccgccaccaaccgagtcctcacctccgcggacacctaccaccggtcccaaatcttcgtcaacggcgacggctccaccaccaacgaagaactccgcgacatcctcgtcgacgccgtagcccccttcctcatcgtccaagtgaaatccaaagatgaattccgcggaagcctcggcacccaaatcaaccaattgctcggcatcatctacggactgctcgccctggcagtgatcatcgcagtcctgggaatcgtcaacacactgttcctctccatcagcgaacgcacccgcgaaatcggaatcctccgcgccaccggcgtccaacgaggacaaatccgccgcatgattaccctcgaatccgtcatcctctccatccacggcgcaatccacggactcctcctaggtacatttatcggctgggcaatcgtcagttgtctccgcacccgaggcatggcacccgtcgaattcccctggacccaaatcggattaatgctcatctccgcaatcatcatcggaggcatagcagccctcatcccagccaaccgagcctcccgaatctcccctttggaagcaatcaactaacagtctgcatcggcaacctcctcttac

SEQ ID NO: 308 - protein, 862 aa, Corynebacterium glutamicum
VANKLRMALTVLSVVLGTAFLCGSLLLTHSLERTFSSIVDAGVEGVDVGVIAQQNNPDGVPFSVIAEIEQYPEVRAVNIIGDGPGMPSGTTMTGQSALILTDSDGNPLQAGSSGTHPLAIYPQGEWVSPEPTLIDGHFPTKPDEVVVNASAAKRGGLSLGDHLTIVTPTERIDATLSGTFESNTDVAGWVGVGFTPQRYVELFTNGTDASQITIAVNDGADPMAVRNRIGKNHRDLLPLLPEQIIDQTTGDTARQLEFMTYVLLAFAAIALIVGSFIIANTFAMIVAQRTGEFALLRSIGVSTFQIGFSVIMEAVFVGLIGGFIGIAVGFGVVNALVQVLNQFGDTLSSIDITYNAGSFIFPVLFAVTATVLSSISPAHRAGNLPPVQAFESSDARSDALGRIRFLVAAVMLTLGISLTIAGAVVSAINGDEFKTETRLAFIGAGLLLVFFSLSLSGPALMVATSQTLGVAIMSPFRAVGKLAQRNTLRNPRRSATTALAVTLSVGLVACVGVIGATTRASVFGSMESTIKSPYVLDSIGGTMIPGQPAGGSRSLSMSAAVAQEIAQTRGVGKVGTLMTGSVQVNGWDNENTTIFDGDLSQFLDLAVRSGDAFDDETPGVMISTTYADQSDLEVGDTVTVNPYGSDDGIRVPITGIYAETNLVGHLMVNAAATNRVLTSADTYHRSQIFVNGDGSTTNEELRDILVDAVAPFLIVQVKSKDEFRGSLGTQINQLLGIIYGLLALAVIIAVLGIVNTLFLSISERTREIGILRATGVQRGQIRRMITLESVILSIHGAIHGLLLGTFIGWAIVSCLRTRGMAPVEFPWTQIGLMLISAIIIGGIAALIPANRASRISPLEAIN

SEQ ID NO: 309 - DNA, 772 bp, Corynebacterium glutamicum
  CDS (101)..(742): RXA02570
ccattgttatgctcattgtgtttgtggtggtcaagtcgctacccaagcgcaccactagggcattggttccgcagcgggttccggaggacgtcgcttaaacatgaatcctttgacatggatcattggcgcattcagcatgtggatcgtggtgctgggcgttaataagcttggtttaagcatcgcagtgatcatcatcgcgcaggtcgtggcgatgattcgggtgcgcaatgtatctgtgttggcttcaacagcattgttatcggttcctgcattggcctcgatggcgctgattcacatgccgtattcttccgacggctggttgattgctcttaccttgacggctcgttttagtgcgttgatgtctattttcctccttgcagcaacagcgattactattcctgagctggtgaaatccctatatcgttggcccaagctggcgtatatcgtgggttctgcattgcagatgattccgcagggtaaacagaccttggcgttggttcgtgatgccaatgctttgcgcgggcgcagcgttaaaggtcccgtgcgcgcggtgaaatatgtgggtttgcccctgattacacatttacttagtgcaggtgccgcgcgagcgattcccttggaggtcgcaggcctggacaggccggggccgcgtacggtgttggttgaggtggtggaggggcgcgtcgaaaagcattgtcgctggttgttgccgcttttggcagtcgggatggcgtggtggctctaactcaaatcgtcggaccgtccggctccg

SEQ ID NO: 310 - protein, 214 aa, Corynebacterium glutamicum
MNPLTWIIGAFSMWIVVLGVNKLGLSIAVIIIAQVVAMIRVRNVSVLASTALLSVPALASMALIHMPYSSDGWLIALTLTARFSALMSIFLLAATAITIPELVKSLYRWPKLAYIVGSALQMIPQGKQTLALVRDANALRGRSVKGPVRAVKYVGLPLITHLLSAGAARAIPLEVAGLDRPGPRTVLVEVVEGRVEKHCRWLLPLLAVGMAWWL

SEQ ID NO: 311 - DNA, 1960 bp, Corynebacterium glutamicum
  CDS (101)..(1930): RXA02591
atgtgtccgttgtctcacctaaagttttaactagttctgtatctgaaagctacgctagggggcgagaactctgtcgaatgacacaaaatctggagaagtaatgactactgctgcaatcaggggccttcagggcgaggcgccgaccaagaataaggaactgctgaactggatcgcagacgccgtcgagctcttccagcctgaggctgttgtgttcgttgatggatcccaggctgagtgggatcgcatggcggaggatcttgttgaagccggtaccctcatcaagctcaacgaggaaaagcgtccgaacagctacctagctcgttccaacccatctgacgttgcgcgcgttgagtcccgcaccttcatctgctccgagaaggaagaagatgctggcccaaccaacaactgggctccaccacaggcaatgaaggacgaaatgtccaagcattacgctggttccatgaaggggcgcaccatgtacgtcgtgcctttctgcatgggtccaatcagcgatccggaccctaagcttggtgtgcagctcactgactccgagtacgttgtcatgtccatgcgcatcatgacccgcatgggtattgaagcgctggacaagatcggcgcgaacggcagcttcgtcaggtgcctccactccgttggtgctcctttggagccaggccaggaagacgttgcatggccttgcaacgacaccaagtacatcacccagttcccagagaccaaggaaatttggtcctacggttccggctacggcggaaacgcaatcctggcaaagaagtgctacgcactgcgtatcgcatctgtcatggctcgcgaagaaggatggatggctgagcacatgctcatcctgaagctgatcaacccagagggcaaggcgtaccacatcgcagcagcattcccatctgcttgtggcaagaccaacctcgccatgatcactccaaccatcccaggctggaccgctcaggttgttggcgacgacatcgcttggctgaagctgcgcgaggacggcctctacgcagttaacccagaaaatggtttcttcggtgttgctccaggcaccaactacgcatccaacccaatcgcgatgaagaccatggaaccaggcaacaccctgttcaccaacgtggcactcaccgacgacggcgacatctggtgggaaggcatggacggcgacgccccagctcacctcattgactggatgggcaacgactggaccccagagtccgacgaaaacgctgctcaccctaactcccgttactgcgtagcaatcgaccagtccccagcagcagcacctgagttcaacgactgggaaggcgtcaagatcgacgcaatcctcttcggtggacgtcgcgcagacaccgtcccactggttacccagacctacgactgggagcacggcaccatggttggtgcactgctcgcatccggtcagaccgcagcttccgcagaagcaaaggtcggcacactccgccacgacccaatggcaatgctcccattcattggctacaacgctggtgaatacctgcagaactggattgacatgggtaacaagggtggcgacaagatgccatccatcttcctggtcaactggttccgccgtggcgaagatggacgcttcctgtggcctggcttcggcgacaactctcgcgttctgaagtgggtcatcgaccgcatcgaaggccacgttggcgcagacgagaccgttgttggacacaccgctaaggccgaagacctcgacctcgacggcctcgacaccccaattgaggatgtcaaggaagcactgaccgctcctgcagagcagtgggcaaacgacgttgaagacaacgccgagtacctcactttcctcggaccacgtgttcctgcagaggttcacagccagttcgatgctctgaaggcccgcatttcagcagctcacgcttaaagttcacgcttaagaactgctaaataa

SEQ ID NO: 312 - protein, 610 aa, Corynebacterium glutamicum
MTTAAIRGLQGEAPTKNKELLNWIADAVELFQPEAVVFVDGSQAEWDRMAEDLVEAGTLIKLNEEKRPNSYLARSNPSDVARVESRTFICSEKEEDAGPTNNWAPPQAMKDEMSKHYAGSMKGRTMYVVPFCMGPISDPDPKLGVQLTDSEYVVMSMRIMTRMGIEALDKIGANGSFVRCLHSVGAPLEPGQEDVAWPCNDTKYITQFPETKEIWSYGSGYGGNAILAKKCYALRIASVMAREEGWMAEHMLILKLINPEGKAYHIAAAFPSACGKTNLAMITPTIPGWTAQVVGDDIAWLKLREDGLYAVNPENGFFGVAPGTNYASNPIAMKTMEPGNTLFTNVALTDDGDIWWEGMDGDAPAHLIDWMGNDWTPESDENAAHPNSRYCVAIDQSPAAAPEFNDWEGVKIDAILFGGRRADTVPLVTQTYDWEHGTMVGALLASGQTAASAEAKVGTLRHDPMAMLPFIGYNAGEYLQNWIDMGNKGGDKMPSIFLVNWFRRGEDGRFLWPGFGDNSRVLKWVIDRIEGHVGADETVVGHTAKAEDLDLDGLDTPIEDVKEALTAPAEQWANDVEDNAEYLTFLGPRVPAEVHSQFDALKARISAAHA

SEQ ID NO: 313 - DNA, 2206 bp, Corynebacterium glutamicum
  CDS (101)..(2176): RXA02604
tctgcatcgtgatggctgtgtacatcatgccgatgttttgaatatttaccaatgaacatgctctgaccagcatgtccattaacgtttgaggccacatgcggtgctagcatgtggcctcatgacgtttagcccccagcgtccggagtttgagaccggtaagcagccagatccagaaactgaacacgcaggtgacttctttgaagaaacctcaagcagtgctcctcgcgccgcatctaacggttcttctggtccgaactacaccctcattacaacgtttctagcggcccttactgctggcatctttgctttctgggcaggctggacccgcaaatggatcagcgacgacggactgatcgtcctacgcaccgtccgaaacctcctggctggaaacgggccagtattcaacgctggcgaacgcgtcgaagccaacacatctactctgtggcaatactgcatctatctggttgccttagtaactgactatcgcctcgaagatattgctctgtggcttgcgctgctgttcaccaccgcagcgtccatcatcggtgtcctgggtaccgcgcatctccaccgcaaacgcattgccgtattgcttcctgcaggcgtgatcggctacttcagcctttccccggcgcgagactttgccacttccggattggagtggggcctatctttgatgtggatttccatccaatggctgctgctggtgttgtgggcgacttcgggcaagacctcgggcaagaaggcttcgggcgcaaaaacttcaaatcctatcgttaatgccggtgcaataacctatgctttggccttttggtcaggcttgagctggctggttcgcccagaactggcgatgtatggcggtttgactggagtgttgctgctgcttactgcgccacgatggcgggtagttttggggatcctggtggcggctttgcctcttccagctgcgtaccaaatcttccgcatgggttattacgggctgatggtgccgcacacggctgtagcgaaatcagcctcagatgcggtgtgggggactggttgggaatatgttgaggatttcacggggccttacaacctgtggctcggtttggccttgctgttggccgcaggcgcgttgacagtgtggaaaactgacaagcacttagcgataccgaaggggcggctggggctgcgcactccgggtatggctatagcgttgctggttatctgtgcgctcgtccacttcctttacgttatccgtgttggtggcgacttcatgcatggacgcatgctgctccttccactttttgccattctgctgcctgtttctgtcattccggtcaatgttgttgatcgaggttggcaggatttggttgcgctggttctcgttttctctacgtgggtgtggtccactgtggtttttgtgcaggggcaccaatgggaaaataccggccagcatgtggttgatgagcgtgatttttggattgatttcaccaaccgagatgaagatcatcctccgctttatgcagaggatttcctcactgttgattccatgaatgattacgcagaggttatgcgcgatcagacgttggttaatccaacaggccagcaactcaatattctggccagcagtgacccgaccacttattcgtggatcaccacacctcgcgtggagggggttgaagccggtgatttggctaacctctcgccaactgttttccatgtgaacctcggcatgacctccatgaacgcaccgctcaacgtgcgtgtgacagacctgattggtttggcaacgccactggcagcccgccagccacgcattgaaggtggtcgaatcggccacgataaattgatggacttggaatggcaggtcgcggaatccgccactccgctggcgtacacaccgggttggttggatactcaaaagacttatgaggcccgccaggcgctacgccacccagaattggttcaccttttccagacttaccgtgagccaatgtcctaccaccggtttgtggacaatattaaatacgcactcactaccggaagaacactggaaatttcagataatcctgaagatcttttgaaagaatttaacccgacccctgcagagattcaggacgggttagaaactattgcttggcctggggaaattaaacttgatgaacctcgcggagaacctttatatagctctcagtaaacacttattcgcaaatcattgggctgt

SEQ ID NO: 314 - protein, 692 aa, Corynebacterium glutamicum
VLACGLMTFSPQRPEFETGKQPDPETEHAGDFFEETSSSAPRAASNGSSGPNYTLITTFLAALTAGIFAFWAGWTRKWISDDGLIVLRTVRNLLAGNGPVFNAGERVEANTSTLWQYCIYLVALVTDYRLEDIALWLALLFTTAASIIGVLGTAHLHRKRIAVLLPAGVIGYFSLSPARDFATSGLEWGLSLMWISIQWLLLVLWATSGKTSGKKASGAKTSNPIVNAGAITYALAFWSGLSWLVRPELAMYGGLTGVLLLLTAPRWRVVLGILVAALPLPAAYQIFRMGYYGLMVPHTAVAKSASDAVWGTGWEYVEDFTGPYNLWLGLALLLAAGALTVWKTDKHLAIPKGRLGLRTPGMAIALLVICALVHFLYVIRVGGDFMHGRMLLLPLFAILLPVSVIPVNVVDRGWQDLVALVLVFSTWVWSTVVFVQGHQWENTGQHVVDERDFWIDFTNRDEDHPPLYAEDFLTVDSMNDYAEVMRDQTLVNPTGQQLNILASSDPTTYSWITTPRVEGVEAGDLANLSPTVFHVNLGMTSMNAPLNVRVTDLIGLATPLAARQPRIEGGRIGHDKLMDLEWQVAESATPLAYTPGWLDTQKTYEARQALRHPELVHLFQTYREPMSYHRFVDNIKYALTTGRTLEISDNPEDLLKEFNPTPAEIQDGLETIAWPGEIKLDEPRGEPLYSSQ

SEQ ID NO: 315 - DNA, 1048 bp, Corynebacterium glutamicum
  CDS (101)..(1018): RXA02678
ctgtgggcgcgcgaacagggcgtcgacatgctcgccaccaattatccggaccgtgcggcggagcttttgaacgcacatcccaagcccgccatgtacgctaatgcgcatggcaaagaagactaagaagaatgaacagctgccggagggcatgagccgtcgtcaggcaaaacttgcagcccgcgcggctgaacgtgcagcacttgagcgtgaacctcgcccattcgagggcctggcaatggagtcacagctcgttgcactgcaggaattcattccatctgcaaccgcacccatcaccgttgcaggcaccgatcgcaagatcaccctctgtaccgtgcttccaggcgcagctgcggcacttgtccgcgaagaagcattcggcggcgaagcgtttgttgcaatgcagcaggccatccgctccaacaacccaagcaaggacctcgcgttcgcgctgaactgggtcatcaacgcaaaagccggcgagtcactggccaccgccacagcggacggcacccagccagagctaaagagcttgcttaacgacgccgacaccctcgaaatcaccactcaccaggacttcaactggtggctggcggaaaacgacaacctctccccagaagttgcgcagcacatgcaggcagccaatgactccatcctgccttcacacgaagtcgaagcagacgtcccaggcgctgtttggtgggtcaacccaggcggaaaagcgcacatccgttgggtccgcaccgaaaacgaaaccgcactgttcaacgctttggcacgcatcgcagcacgtggcgagctgaatctcggcgaagaaactaagttcgctggtgctttccgcacccacggcatcgtcgtcccagtgtgggatctcgatcctgagcgtccatccaccgattacgccgatgttttggttgcactcaacgagaagatcgtcgctgaactggataacgatgcacagctcaacgccgacgagcgccgtcagctggagaacatcaagtcccgccaggtgaccatccgctaaaatctcttaaaaacacttcaagcgcgt

SEQ ID NO: 316 - protein, 306 aa, Corynebacterium glutamicum
MRMAKKTKKNEQLPEGMSRRQAKLAARAAERAALEREPRPFEGLAMESQLVALQEFIPSATAPITVAGTDRKITLCTVLPGAAAALVREEAFGGEAFVAMQQAIRSNNPSKDLAFALNWVINAKAGESLATATADGTQPELKSLLNDADTLEITTHQDFNWWLAENDNLSPEVAQHMQAANDSILPSHEVEADVPGAVWWVNPGGKAHIRWVRTENETALFNALARIAARGELNLGEETKFAGAFRTHGIVVPVWDLDPERPSTDYADVLVALNEKIVAELDNDAQLNADERRQLENIKSRQVTIR

SEQ ID NO: 317 - DNA, 1000 bp, Corynebacterium glutamicum
  CDS (101)..(970): RXA02683
gaagtgtccagtcaactttttggttaattgattatcttacctagagacttggatacttccctccacggattgctaacgatccagttttatcgttggactcatgaaaaagatccacatgattccagcggccctcctcatcggttcccttgcgcttgttagctgcgcgccttcacaacctacccagaacgcgcagacggtttcttctgtcatgacggaaactcctacttatacctcttcatctaggtcggtggaatctaccgcggggacgatcgctgcctcggaggaagccacgatgacgctactggagaatagttcgggggatccgggatctgattctgggggtgcacgctatagcctcaattcgctcaaagtttctgagcaggccgcggctaacgccgtcttaaaggccgtgcttaacgacgtctcctaccaagagttcgcagactcctcctacttagaaatcacaggaacgccctccgccgacggaacatggggcatctcatttggcggaccttccgaatcggcctccgtggaattctccgacggcagcatcagcttctcccctgttgacatgacagtgcccgcaacacgattgcctcagatgggcgcattttatgaaaccctgaccgaagaacaattaggcatgctggagactggcctcgcggtttccaccgtggattcgagccaacaggaaatgcttctggacttggtctccaactcgatcggcctggcagatactgaaaccactgcgactgcaattagtaaaatccgagcaacgctttccgagacctacctgttcggaacccccgacggattaaccttggcgcttagtggcccacacgttgatttcgaagtctcccaccagggcagcaccgcgaaaattacttaccgcgatccaagcaccgacaccttaaccgccgaagatcgggtagataccgcaagtgtggctgctgctccgccggaggttgtttaggcgtttgccgagaaattttcattgggc

SEQ ID NO: 318 - protein, 290 aa, Corynebacterium glutamicum
MKKIHMIPAALLIGSLALVSCAPSQPTQNAQTVSSVMTETPTYTSSSRSVESTAGTIAASEEATMTLLENSSGDPGSDSGGARYSLNSLKVSEQAAANAVLKAVLNDVSYQEFADSSYLEITGTPSADGTWGISFGGPSESASVEFSDGSISFSPVDMTVPATRLPQMGAFYETLTEEQLGMLETGLAVSTVDSSQQEMLLDLVSNSIGLADTETTATAISKIRATLSETYLFGTPDGLTLALSGPHVDFEVSHQGSTAKITYRDPSTDTLTAEDRVDTASVAAAPPEVV

SEQ ID NO: 319 - DNA, 868 bp, Corynebacterium glutamicum
  CDS (101)..(838): RXA02721
ccgtgatgatcgtcgtgacgatcgccgcgatgaccgcggagacgacctggatgtacccagcttcctccagtaattaagaaggagaatagacttatccactatggatagtcttgacccccgcaaccgccccgtccgcaaggtcttcacgacccgtgccggcggggtttcgcagtccccgtatgcttccttcaaccttggtgatcacgtcggcgacgatcctcaagctgtggcatccaaccgcaatcgcttggctgacatcatcggtttgtccccagacaaggtggtgtacatggagcaaattcattccaataccgtcacagtcattgatgaagccccagcggatggccaggctgtagaggccaccgatgcgctagtgaccacgcaacgagggctagcgctggccgttttggttgctgattgcgtgccagtgctgctgtcagacaccgacgctggcgtgattgcggcagtgcatgcaggccgcatgggagcccgcaatggcatcgtagctaaaaccattgcgaagatggaggagctcggcgcgaaacccagccgcattcatgcgctcatgggtgcagcggcatcgggtgcgaactacgaggtcccagaggccatggcgcgcgatgtggaagccaaacttccaggttccattgcgcgtacgacaaaaggcaccacaggactggacatccgcgcagggctgctgcgtcaaatgctcagcctgggtgtgcaaatgattgattctgatccacgctgcaccatcgaagacgaagatctgttttcttaccgccgcgaaggcacgacaggccgccaggccggcgtggtgtggctgccaaaggaggcataaattggagcgccgcgaagagctgcaggt

SEQ ID NO: 320 - protein, 246 aa, Corynebacterium glutamicum
MDSLDPRNRPVRKVFTTRAGGVSQSPYASFNLGDHVGDDPQAVASNRNRLADIIGLSPDKVVYMEQIHSNTVTVIDEAPADGQAVEATDALVTTQRGLALAVLVADCVPVLLSDTDAGVIAAVHAGRMGARNGIVAKTIAKMEELGAKPSRIHALMGAAASGANYEVPEAMARDVEAKLPGSIARTTKGTTGLDIRAGLLRQMLSLGVQMIDSDPRCTIEDEDLFSYRREGTTGRQAGVVWLPKEA

SEQ ID NO: 321 - DNA, 757 bp, Corynebacterium glutamicum
  CDS (101)..(727): RXA02725
gagttgttttgttgagaaagcccgctgcacatcggtgtggcgggttttctcatgcccagatattgaccttgtcactgtgtcaaggcattgaataagtgccatgaacataagtgccatggacaacttcgaacattcaaatgcatctatccgtttacaagcagcgttggccgcaggaactgctgaggacaccactgcgatcgatattcttttgtaccgcagtggggtagaagaagacttctttgtgcgcgacatgatcacgtgggcgctcacccgcatgccagttgatgacgtgtttacctcactggtcgctgatttggattctgaggtacctgatcgaccattcggtgcaagtcaagcactccacacactctccaagttaagggtcgcgcagtcgtggcaggaattgcaagcacggccttggcttttgcaccgggaggacaccgcccaaactgcgtggcgaacctttgtgggactggtcccagatgatcagaccgcatggttggcgcaccaattgctccaagaattggataaaggaacgcctgaaattcagcggagtttaagtcgggcgatggcggaattggaggggagggaggcgtcgataagcgtgcttctaggcgctttaacgagcgcgcacgcggtggccaccgccaagctcattgcggatccggactccgatttcatggctgatctggaggaagcgcggcgcgtggataatatgggtgcatgctgatcggtgaggtgtccaagctcagtgggg

SEQ ID NO: 322 - protein, 209 aa, Corynebacterium glutamicum
MNISAMDNFEHSNASIRLQAALAAGTAEDTTAIDILLYRSGVEEDFFVRDMITWALTRMPVDDVFTSLVADLDSEVPDRPFGASQALHTLSKLRVAQSWQELQARPWLLHREDTAQTAWRTFVGLVPDDQTAWLAHQLLQELDKGTPEIQRSLSRAMAELEGREASISVLLGALTSAHAVATAKLIADPDSDFMADLEEARRVDNMGAC

SEQ ID NO: 323 - DNA, 955 bp, Corynebacterium glutamicum
  CDS (101)..(925): RXA02735
accggctcgatcatcatcaccatctatgacgctcatacccttcaggtagagatgccggaatccggcaatgccccatcgctggtggctattggtcgtcgaagtgagtccgactgcttgtctgaggagcttcgccacatggatccagatttgggctaccagcacgcactatccggcttgtccagcgtcaagctggaaaccgtctaaggagaaatacaacactatggttgatgtagtacgcgcacgcgatactgaagatttggttgcacaggctgcctccaaattcattgaggttgttgaagcagcaactgccaataatggcaccgcacaggtagtgctcaccggtggtggcgccggcatcaagttgctggaaaagctcagcgttgatgcggctgaccttgcctgggatcgcattcatgtgttcttcggcgatgagcgcaatgtccctgtcagtgattctgagtccaatgagggccaggctcgtgaggcactgttgtccaaggtttctatccctgaagccaacattcacggatatggtctcggcgacgtagatcttgcagaggcagcccgcgcttacgaagctgtgttggatgaattcgcaccaaacggctttgatcttcacctgctcggcatgggtggcgaaggccatatcaactccctgttccctcacaccgatgcagtcaaggaatcctccgcaaaggtcatcgcggtgtttgattcccctaagcctccttcagagcgtgcaactctaacccttcctgcggttcactccgcaaagcgcgtgtggttgctggtttctggtgcggagaaggctgaggcagctgcggcgatcgtcaacggtgagcctgctgttgagtggcctgctgctggagctaccggatctgaggaaacggtattgttcttggctgatgatgctgcaggaaatctctaagcagcgccagctctaacaagaagcttt

SEQ ID NO: 324 - protein, 275 aa, Corynebacterium glutamicum
VSPTACLRSFATWIQIWATSTHYPACPASSWKPSKEKYNTMVDVVRARDTEDLVAQAASKFIEVVEAATANNGTAQVVLTGGGAGIKLLEKLSVDAADLAWDRIHVFFGDERNVPVSDSESNEGQAREALLSKVSIPEANIHGYGLGDVDLAEAARAYEAVLDEFAPNGFDLHLLGMGGEGHINSLFPHTDAVKESSAKVIAVFDSPKPPSERATLTLPAVHSAKRVWLLVSGAEKAEAAAAIVNGEPAVEWPAAGATGSEETVLFLADDAAGNL

SEQ ID NO: 325 - DNA, 1087 bp, Corynebacterium glutamicum
  CDS (101)..(1057): RXA02736
cagaggattacccagcgggtacgtggggtccaaagagcgctgatgaaatgctttcccgcaacggtcacacctggcgcaggccataatttaggggcaaaaaatgatctttgaacttccggataccaccacccagcaaatttccaagaccctaactcgactgcgtgaatcgggcacccaggtcaccaccggccgagtgctcaccctcatcgtggtcactgactccgaaagcgatgtcgctgcagttaccgagtccaccaatgaagcctcgcgcgagcacccatctcgcgtgatcattttggtggttggcgataaaactgcagaaaacaaagttgacgcagaagtccgtatcggtggcgacgctggtgcttccgagatgatcatcatgcatctcaacggacctgtcgctgacaagctccagtatgtcgtcacaccactgttgcttcctgacacccccatcgttgcttggtggccaggtgaatcaccaaagaatccttcccaggacccaattggacgcatcgcacaacgacgcatcactgatgctttgtacgaccgtgatgacgcactagaagatcgtgttgagaactatcacccaggtgataccgacatgacgtgggcgcgccttacccagtggcggggacttgttgcctcctcattggatcacccaccacacagcgaaatcacttccgtgaggctgaccggtgcaagcggcagtacctcggtggatttggctgcaggctggttggcgcggaggctgaaagtgcctgtgatccgcgaggtgacagatgctcccaccgtgccaaccgatgagtttggtactccactgctggctatccagcgcctggagatcgttcgcaccaccggctcgatcatcatcaccatctatgacgctcatacccttcaggtagagatgccggaatccggcaatgccccatcgctggtggctattggtcgtcgaagtgagtccgactgcttgtctgaggagcttcgccacatggatccagatttgggctaccagcacgcactatccggcttgtccagcgtcaagctggaaaccgtctaaggagaaatacaacactatggttgatgt

SEQ ID NO: 326 - protein, 319 aa, Corynebacterium glutamicum
MIFELPDTTTQQISKTLTRLRESGTQVTTGRVLTLIVVTDSESDVAAVTESTNEASREHPSRVIILVVGDKTAENKVDAEVRIGGDAGASEMIIMHLNGPVADKLQYVVTPLLLPDTPIVAWWPGESPKNPSQDPIGRIAQRRITDALYDRDDALEDRVENYHPGDTDMTWARLTQWRGLVASSLDHPPHSEITSVRLTGASGSTSVDLAAGWLARRLKVPVIREVTDAPTVPTDEFGTPLLAIQRLEIVRTTGSIIITIYDAHTLQVEMPESGNAPSLVAIGRRSESDCLSEELRHMDPDLGYQHALSGLSSVKLETV

SEQ ID NO: 327 - DNA, 934 bp, Corynebacterium glutamicum
  CDS (101)..(904): RXA02744
gccaaaacgtcatgattcgctctttggatacgggacaccgctcattggaagatgtcttcctggacatcaccggaaaagaactgaggagttaacgcacaccatgtctaaaccttttgaaaactctgcgctccgcggttcttctcgattcccagctggaacgttcacccctgctcccaaacgagccaccccggcaaaaatgttggctgctcagggcaagatggaatccctgctgtttcttcgccacggcgaacagcaactgctcagcatcatcattcccttggtcgcgctcatcgcactagcgaattttgatttcatccctggtgagaactccctcgacaagactttccccttcgcgctggccacagcagccatgagcgctggttttacaggtcaagccatcagcctagcttttgaccgccgctatggtgccctcaagcgcaccggcgccagcggtgttcccgcctggacgattatttttggcaaagtcatcgcagtcattgcagtcaccattgtgcagatcatctttctcggtgtgactgcactgctgttgggctggtccgcacctgtcggtggtgtgctctttggcatcgtgaccctatttgtgggtgtttccagcttcaccgcgctcggcatgctgatgggcggaacgttgtcctccgaattggtattggcactggctaacttgatttggattgtactgtccggccttgcagcatgggcggtcttttccccttccgtcaacgctgaaggagtgctgtccatcatcccatccgttgcgctgtcccaaggtatggttgacgcattcaacggcgaacttccgtggctccagctaggaattttggtgggctggctaattatcaccggcgtggccgcaaacaagctatttaacttctctgcgagccgctagatatacccttagtcggaaaatatcctt

SEQ ID NO: 328 - protein, 268 aa, Corynebacterium glutamicum
MSKPFENSALRGSSRFPAGTFTPAPKRATPAKMLAAQGKMESLLFLRHGEQQLLSIIIPLVALIALANFDFIPGENSLDKTFPFALATAAMSAGFTGQAISLAFDRRYGALKRTGASGVPAWTIIFGKVIAVIAVTIVQIIFLGVTALLLGWSAPVGGVLFGIVTLFVGVSSFTALGMLMGGTLSSELVLALANLIWIVLSGLAAWAVFSPSVNAEGVLSIIPSVALSQGMVDAFNGELPWLQLGILVGWLIITGVAANKLFNFSASR

SEQ ID NO: 329 - DNA, 853 bp, Corynebacterium glutamicum
  CDS (101)..(823): RXA02757
ccattcctcgacgaggttttgcacatcatgggcatttcccgcgacgagatcgatctggcggatcaggaagacggcactttccaccgcgttccattgaccaatgcctaaagattcgcttctcgacgcccacctcctcctcaaggcccgggctagcgacgggccacatagcgaggatccttcggatccttcgaccgttcaggcaatgcagatcgcgttgcacattccgaaacagaatccgccccggcggacagatgtgttggaagcggcggcgaggagtgtggtcaagctttgcctcgacgaacgagtatccaccgatcctgattttcgggcggccttggaacgttggtacggacacttgattcggaaggtgtcacgtcgcgctcgtaatgcggcgtgggatcgggtgcaagatttacccggcgtgactgtggaagatgatgctgcaaaggttcgggcatttttgcccagcgcagtggtggatgtgcctgcagatatcaaaaagctgcagatttccggtacggaattgcctctcgatgagccgaatccgatcaacgatgaataccccgttatctacattgatgaatcgttgaagatgacgctgggaaaggccgctgcgcaggtaggacacgcatccatgttgcttgccgcgcaccaaccgtttgagtgggtggagcagtgggaagcagcggattttgcgctgcacgtcagggagattccctcggaggagttcctgcgccttatcgagtctcctggtgctgttccagttcgcgatggcggctttactgaggttgcccccaacaccgtgacggttgttgcaattccataactaaacgagctttgattaacaagtcct

SEQ ID NO: 330 - protein, 241 aa, Corynebacterium glutamicum
MPKDSLLDAHLLLKARASDGPHSEDPSDPSTVQAMQIALHIPKQNPPRRTDVLEAAARSVVKLCLDERVSTDPDFRAALERWYGHLIRKVSRRARNAAWDRVQDLPGVTVEDDAAKVRAFLPSAVVDVPADIKKLQISGTELPLDEPNPINDEYPVIYIDESLKMTLGKAAAQVGHASMLLAAHQPFEWVEQWEAADFALHVREIPSEEFLRLIESPGAVPVRDGGFTEVAPNTVTVVAIP

SEQ ID NO: 331 - DNA, 1237 bp, Corynebacterium glutamicum
  CDS (101)..(1207): RXA02777
ggtcgcaccacaccaactactgtttcttctgtaatttgcactgaaactatcgcctacactgtcactgctaccatcacaatcggttgctagtaggctacaaatgaaccgcccccttcaaagtcaaaatttttcaataaccagcgaatgggcaaatgccacgttcaacgatatcgaagactctttggaggggtcttttgacatcgaaccaggccaatacattggacgcggagaatacttcgtagctacttctggaacgggttccaaaaagtttatcaaggtggttttgggtgacggtatcgatagcgaactaaatcgtcgcatcgaaggtgaaattcttgcaagtagtctccatcttccatccacagacctaatctctcctgtcgtaattcagtatgtgaaagagtcttctaattttcccggtgacttctacatcgtgtccgacttcaaagacgacacagaaactttagagctatctaaggcttctctacccctcactgacttagccaagatcggagcgtttctctttcgtttggaatctgtaacagttccccctcaaaatcctgcaaggcgagcaatggatgttttggatggactttctcttcttgcaaataaaggcaacattgaaacaggcgcacaattaacaaaaggaactatacaagctcttgaaatcattaatcaagaagcgaccaacatcgagaatgcacttgaaaaagtaactaaagtaggatcacggaagtttttctcgcatggagatcttaaattttctcagttcttaattaatggtgaaaccggaaagattttcctatgtgactgggaagaatgcggtagtgcacatttcgcaaatgacctatgttttctcgcaggtgatttgttctatagcacaattcgggaactggtggataccaacatcaaaaacattaaaggctcctcgatcattcaggaagcctacgataatgcaacgcttgaggctgtatcaaaagtaaatgcaatattaactggctattcctcagagaggggttactctctcacctcggacgaaaaacgaatcattagtatcagaatcggattggctggtctatttcgactttacactgtgagcgctaaatctaatgagttacgcccgcgcgaattagccttagcctccatcggaatgcaaattactttaggtcaagcacccaatctggtgtttacagatagcaaggtggtttaagtgaggaatttgcacgaaacgatagac

SEQ ID NO: 332 - protein, 369 aa, Corynebacterium glutamicum
MNRPLQSQNFSITSEWANATFNDIEDSLEGSFDIEPGQYIGRGEYFVATSGTGSKKFIKVVLGDGIDSELNRRIEGEILASSLHLPSTDLISPVVIQYVKESSNFPGDFYIVSDFKDDTETLELSKASLPLTDLAKIGAFLFRLESVTVPPQNPARRAMDVLDGLSLLANKGNIETGAQLTKGTIQALEIINQEATNIENALEKVTKVGSRKFFSHGDLKFSQFLINGETGKIFLCDWEECGSAHFANDLCFLAGDLFYSTIRELVDTNIKNIKGSSIIQEAYDNATLEAVSKVNAILTGYSSERGYSLTSDEKRIISIRIGLAGLFRLYTVSAKSNELRPRELALASIGMQITLGQAPNLVFTDSKVV

SEQ ID NO: 333 - DNA, 316 bp, Corynebacterium glutamicum
  CDS (101)..(286): RXA02784
agctgcaactcaggtagaagaaacaacagtcgcccgagttgaacacgatacttacgacactattgctaaccagctacaagatgccggtgtctatgacgatgtggcctttgccgaaggctactaccaggaaatggctgaggttgtatgtgaagcacgcgaagagggtatcacccacgaggacaccctgcatatgctcaatgacatgatggcaatgaaacgatctggcgaagtactcaatacgctcgctgatgttctctatgcaaatgaatgccctgaatatcgaatctaaattgttggttcactctgcatagacaca

SEQ ID NO: 334 - protein, 62 aa, Corynebacterium glutamicum
VAFAEGYYQEMAEVVCEAREEGITHEDTLHMLNDMMAMKRSGEVLNTLADVLYANECPEYRI

SEQ ID NO: 335 - DNA, 1354 bp, Corynebacterium glutamicum
  CDS (101)..(1324): RXA02786
atagaatgaggaaatatgcgcttccgcgccgatcaaattcattgattgttaatcggaagttttttgaacaggtaaagctaggggacctgttcagtgcctgttggcggatgtattaaggagaatgcccatgctgagccacgaagaaattgttgcgatcgcagaagatttgctgtctaaacgctacggcggtgtacaaactctttctgacgtggagcagctcaacggttccggcacctccgcggtgctgcgtgccagggtggctaactccccattcctccaacagcgctccgtggtgctgaagtacgtgcccagcaccggagacgtctttgatgattctgcgctggtgcgtgaaatcgtctcctaccagttcaccacctccttgtcggaagatgtccgcccagggccagtcattttggcctatgacattgacaagcgcatcctggtcatttcagattccggcaacggcgacacctttgcggatctgatcgatcagcgtaccggtgatcagcgcatgcagatcctgcgcaacctcggccaatcgctgggcagcctgcacgccgccaccgcagaccgcgaagaagacttcaacattctgctcaaccgtatgctggccaaatacccagccacagctgagatgcagaaaaaccgcgataggttgctgcccgcagcaattgaggtgggtaaaaagatacttgtcgacgccggggtcaccgttccagaagtcgtcgaggagtttgcccgcgtagctcggcgacgcctgatttccggacgccaccgtgccttcacaccttttgacttgtcacccgacaacatcatcgtggctgaacgcacccacttcctggactacgaagttgccggtttcagggatgccacctttgatgttgcttgtgtgatcgcaggtttcccgcaattcgtgttcagccgccccatctctgatgatgaggtagacgaactcattgaatcctgggtccaagaagtccgtggaatctggcccaatgtgaacaatgaagagcgcctccaagcacgtatcgtgaccgctctcatcggctgggcactatcgagtgttgccttcatgaagctcggctccatcagcggcatgcttaacctgctgcacgtcaccgaagatggaaacaccactttggatgtctccaaccttgatgaactgttgattccacgatctgccgaagatgacgagctggtccagcaagacctccacgacacgttctccgcgcttcagcgatttgcagcgcgcgggctggattccaggttccctgaggtggcacgattcgcagacgacgtggtgcgtttgttcctcaaaaatgactagctgaagagcaccggttgcttggttgtt

SEQ ID NO: 336 - protein, 408 aa, Corynebacterium glutamicum
LADVLRRMPMLSHEEIVAIAEDLLSKRYGGVQTLSDVEQLNGSGTSAVLRARVANSPFLQQRSVVLKYVPSTGDVFDDSALVREIVSYQFTTSLSEDVRPGPVILAYDIDKRILVISDSGNGDTFADLIDQRTGDQRMQILRNLGQSLGSLHAATADREEDFNILLNRMLAKYPATAEMQKNRDRLLPAAIEVGKKILVDAGVTVPEVVEEFARVARRRLISGRHRAFTPFDLSPDNIIVAERTHFLDYEVAGFRDATFDVACVIAGFPQFVFSRPISDDEVDELIESWVQEVRGIWPNVNNEERLQARIVTALIGWALSSVAFMKLGSISGMLNLLHVTEDGNTTLDVSNLDELLIPRSAEDDELVQQDLHDTFSALQRFAARGLDSRFPEVARFADDVVRLFLKND

SEQ ID NO: 337 - DNA, 1555 bp, Corynebacterium glutamicum
  CDS (101)..(1525): RXA02798
gcatcaaaatcatgtgcattcatcattgctgatcatcatagacctgttggcaaatgaattcaccaattctttaaagctctcaccctctttagggaactgaatgcggtctgtactcgactactggatcatgactcttgcaccttccaccaatgcggtttcgcagcaaacaagaaggaacccttcccaagcgccgcgacttcttcatcgacttcacttctttgccggcattatctgcgcaccgttgattttcatcgctgcgctcaccggactggtgtatgcgttctcccccaccattgaaagcatctctaatcaggaaatgctcacggtctccaagtcggctagcgacacagctcttccggtgcgtgaacaagtgagcatcgcccaagaactccaccccgatttagatctctcaggtgtccggcttggcgatgattcctccaccacccgcgtcctcttcgccgacgagacgcttgctgaatccacagtccgcgccgtgtttgttgatccctacaccggcgagatcaccggtgataccacccaatacggaagctcagctgcactgccgtttcggcaatgggtctcgcaaggtcaccgcatgttgtggcttggtgaacctggacgtatttattccgaacttgcggcaagttggctcggagttttagccgtaggcggtttcgcattattgtggttgcgcaacaaaaagcccggccgcttgagaaagatggtgcgaactggtggccgtggtcgagtgaaaacgtatcgccgacatgcagcattgggcaccgtagcgggcttgggttttgtgttcctcacctttactggcctgacctggtcaacttatgcgggatccaacatcacggatttacgcacccaactcaattggacgcagccttccgttaacgcttctctaacagctgccccacaagtggacatgcatgatgaacacgcaggtcatcacatgcatatggagtcggcaacctcaggctcaggttctatagatctggtagcggccacggctatctccgaattacgcactcccctcaccattactcccccagcacaagatggcctcgcgtggactgccacagaaaaccgcgacgcctaccgattcaccactgacaccatcgctgttgatggcgacaccggaatgctgaccaaccgtttgaattccactgattggccattagctgctcaagcgagtgcatggctcatccagcttcacatgggcaccctgtttggccttcccaaccaggttgtacttgggctgttggctgcctcaataatcgtgatgatcggccttgggtattggatgctgtggcagcatcggccacgggaaggttggcctagcgctcccaagcgtgcaggatttgaaaaacccacctggggaactatcgcgttgggtgttgtggtgatcgcgtatgggcttctcgcgccactttttgcagtttcactgctcgtgtttattggattaagccttggagtgcggtttatttctcgtatgtccgggcgcgcggacacgtccaactaagaacaccaaaccacaccgcccacgaat

SEQ ID NO: 338 - protein, 475 aa, Corynebacterium glutamicum
MRSVLDYWIMTLAPSTNAVSQQTRRNPSQAPRLLHRLHFFAGIICAPLIFIAALTGLVYAFSPTIESISNQEMLTVSKSASDTALPVREQVSIAQELHPDLDLSGVRLGDDSSTTRVLFADETLAESTVRAVFVDPYTGEITGDTTQYGSSAALPFRQWVSQGHRMLWLGEPGRIYSELAASWLGVLAVGGFALLWLRNKKPGRLRKMVRTGGRGRVKTYRRHAALGTVAGLGFVFLTFTGLTWSTYAGSNITDLRTQLNWTQPSVNASLTAAPQVDMHDEHAGHHMHMESATSGSGSIDLVAATAISELRTPLTITPPAQDGLAWTATENRDAYRFTTDTIAVDGDTGMLTNRLNSTDWPLAAQASAWLIQLHMGTLFGLPNQVVLGLLAASIIVMIGLGYWMLWQHRPREGWPSAPKRAGFEKPTWGTIALGVVVIAYGLLAPLFAVSLLVFIGLSLGVRFISRMSGRADTSN

SEQ ID NO: 339 - DNA, 1729 bp, Corynebacterium glutamicum
  CDS (101)..(1699): RXA02817
aaaattcccacccccaaaactcccccacttcggttaaggaatcaggattctcacaaagttcaggcaggctcccgctacttttcagcgctaatcttggctcatgattttaggcgtacccattcaatatttgctctattcattgtggaattggattgtcgataccggttttgatgtagcaattatcctggtcttggcgtttttgattccacgtatcggccgactggccatgcgtattatcaagcgccgagtggagtctgcagccgatgcggacaccactaagaaccagctcgcgttcgccggcgttggcgtttatatcgcgcaaattgtggcgtttttcatgcttgccgtctccgcgatgcaggcttttggtttctctctcgcgggcgctgcgattccggcaaccattgcgtcagctgccattggccttggtgcgcagtcgattgttgcggacttcttggccggatttttcatcctgacggaaaagcaattcggcgtgggtgactgggtgcgttttgagggcaacggcatcgttgtcgaaggcaccgtcattgagatcaccatgcgcgcgaccaaaattcgcacgattgcacaagagaccgtgatcatccccaactccacggcgaaagtgtgcatcaacaattctaataactggtcgcgtgcggttgtcgttattccgatccccatgttgggttctgaaaacatcacagatgtcatcgcgcgctctgaagctgcgactcgtcgcgcacttggccaggagaaaatcgcaccggaaatcctcggtgaactcgatgtgcacccagccacggaagtcacgccgccaacggtggtcggcatgccgtggatggtcaccatgcgtttcctcgtgcaagtcaccgccggcaatcaatggctggtcgaacgcgccatccgcacagaaatcatcagcgaattctgggaagaatacggcagcgcaaccactacatcgggaaccctcattgattccttacacgttgagcatgaagagccaaagacctcgcttatcgacgcctccccccaggctcttaaggaaccgaagccggaggctgcggcgacggttgcatcgctagctgcatcctctaacgacgatgcagacaatgcagacgcctcggtgatcaatgcaggcaatccagagaaggaacttgattccgatgtgctggaacaagaactctccagcgaagaaccggaagaaacagcaaaaccagatcactctctccgaggcttcttccgcactgattactacccaaatcggtggcagaagatcctgtcgtttggcggacgtgtccgcatgagcacgtccctgttgttgggtgcgctgctcttgctgtcactatttaaggtcatgactgtggaaccaagtgagaattggcaaaactccagtggatggctgtcaccaagcactgccacctcaactgcggtgaccacctccgaaacttccgcgccagtaagcacgccttcgatgacagtgcccactacggtggaggagaccccaacgatggaatctaacgtcgaaacgcagcaggaaacctcaacccctgcaaccgcaacgccccagcgagccgacaccatcgaaccgaccgaggaagccacgtcgcaggaggaaacgactgcgtcgcagacgcagtctccagcagtggaagcaccaaccgcggtccaagagacagttgcgccgacgtccaccccttaggacgctgattacagacgtgtcccattt

SEQ ID NO: 340 - protein, 533 aa, Corynebacterium glutamicum
MILGVPIQYLLYSLWNWIVDTGFDVAIILVLAFLIPRIGRLAMRIIKRRVESAADADTTKNQLAFAGVGVYIAQIVAFFMLAVSAMQAFGFSLAGAAIPATIASAAIGLGAQSIVADFLAGFFILTEKQFGVGDWVRFEGNGIVVEGTVIEITMRATKIRTIAQETVIIPNSTAKVCINNSNNWSRAVVVIPIPMLGSENITDVIARSEAATRRALGQEKIAPEILGELDVHPATEVTPPTVVGMPWMVTMRFLVQVTAGNQWLVERAIRTEIISEFWEEYGSATTTSGTLIDSLHVEHEEPKTSLIDASPQALKEPKPEAAATVASLAASSNDDADNADASVINAGNPEKELDSDVLEQELSSEEPEETAKPDHSLRGFFRTDYYPNRWQKILSFGGRVRMSTSLLLGALLLLSLFKVMTVEPSENWQNSSGWLSPSTATSTAVTTSETSAPVSTPSMTVPTTVEETPTMESNVETQQETSTPATATPQRADTIEPTEEATSQEETTASQTQSPAVEAPTAVQETVAPTSTP

SEQ ID NO: 341 - DNA, 1969 bp, Corynebacterium glutamicum
  CDS (101)..(1939): RXA02825
tggcctgcccctgaaacttttacggctttcagagcgcagggcatcattttcttgtgtcgccaacacttgagaaaaattgcggaaaaggacactgctgttcatgaaacttgcacctcgtatgcggatgaggagccccaaaactttcgcggccctcgcctcacttgctttagtcataggtctcggccaggtaccgatcgcccaagctcaaaccgagtatcgaaccgcctccgacggttccctgaactggggatttaggcaatcgttccgcaattacatccaaaccggcgtggccaaaggttccatcacgcttggcgacggcgcatccgacaacggtggcaacttcgcattcaccccacgcaccaacggcaccaccgtgaccagcgattcccaaggcaccgtggaattcaacggctccgtgcacttcctcggacaccaggcagaggacaaatggatcctggacaccaccatgtctgacatcaaaatggtgttcaacggatcctccgcgcagctagttgtggatttggttgcccgcgaattcaagggcaccacctacgatgacatcggcgaatacatcatctccgacgacatcgtgcttgccgacgtctccctcaactccgccgccgacttctcccaagattccatcgacctgtccggcaccaccgacctcaccgcagctggcgcccaagctttcggaggattctacgaaaccggcgaagccctcgacccgaccggcggcagcctgaccatttcctccaccaccaccgcgccatcgaccagcacgacctccacctctgcctcaacttccggtggaaccgccgactgttcctccggcgcattgggtgttgtcaccaccggaaccaacgacggcatgctgggcaccatccaggaagtaaacaacaccttcgcgatttggaacaacctcatcgtcaacaccgagcgcatgttctgcaacattgataccctcaaggcgcgcttcgacacggatgattccagcgattcagcgacctctgcgacttctgggactactgcgtccaccggcaccaccgctgcaactaccgcgggaaccacgggtaccactggaactgccagcaccgcttccggaacttccggaacttccggaacctccggcaccgcagcaactgtcgctggcaccaccccaactgacaatggcgtttgcaccgcttccggatctttgggcgtgacccaagcatctgcgcagtggggtgtgaaggcgtccttccagaactacattcgcggatcgatcgccaacggtagctggactctcaacggcgttggttttgataatcagcagttccaattctctggaaattccggagcagtcgacgcggaaaacaagaccggcagcatcaatttccctggttccatccacttcacgggtcacggcggaatcttggacatgcagatcgcaaacattgagatcagcttcaacggcaactccggcgagctgattgcggatgtcgtttcctctgacatggatggaaattccaccaactacggtcgcactgtcgtgggcaccctgaacttctctgcgttgaatgtttctgcaacggaagcttccggttccgcttcggtgtccctgtcacagtcgggttcgcaggcgttcgctgatttctacaccccaggcacccagttggatccgatcagtttcagcgcaactttgggcggcgacgccagctgcgccaccggatccacctcgaccacaggcgctgctgccaccgcgaacactgacaacaccgaaggtgttgccggcgaggaatccaccacccccgctaaccaaaacagccagttccaaatccgccaggccgctgcagattccaccggactggataccaccaccacaatgttgctcatcctcgcggcgttcgttgtcgcaggtggctccatgactcgcttcaccgtcggcaacccgactggaaaataaggcttcacatgaataacgcttttcgac

SEQ ID NO: 342 - protein, 613 aa, Corynebacterium glutamicum
MKLAPRMRMRSPKTFAALASLALVIGLGQVPIAQAQTEYRTASDGSLNWGFRQSFRNYIQTGVAKGSITLGDGASDNGGNFAFTPRTNGTTVTSDSQGTVEFNGSVHFLGHQAEDKWILDTTMSDIKMVFNGSSAQLVVDLVAREFKGTTYDDIGEYIISDDIVLADVSLNSAADFSQDSIDLSGTTDLTAAGAQAFGGFYETGEALDPTGGSLTISSTTTAPSTSTTSTSASTSGGTADCSSGALGVVTTGTNDGMLGTIQEVNNTFAIWNNLIVNTERMFCNIDTLKARFDTDDSSDSATSATSGTTASTGTTAATTAGTTGTTGTASTASGTSGTSGTSGTAATVAGTTPTDNGVCTASGSLGVTQASAQWGVKASFQNYIRGSIANGSWTLNGVGFDNQQFQFSGNSGAVDAENKTGSINFPGSIHFTGHGGILDMQIANIEISFNGNSGELIADVVSSDMDGNSTNYGRTVVGTLNFSALNVSATEASGSASVSLSQSGSQAFADFYTPGTQLDPISFSATLGGDASCATGSTSTTGAAATANTDNTEGVAGEESTTPANQNSQFQIRQAAADSTGLDTTTTMLLILAAFVVAGGSMTRFTVGNPTGK

SEQ ID NO: 343 - DNA, 739 bp, Corynebacterium glutamicum
  CDS (101)..(709): RXA02951
gataatgagtcagaaaatgaaggtagcactacttgctggattaattttcaaggttttctttcagaaattaatccatagccgatatttaaggtgagaacacatgagctccacgctcgcacgaaaagcttcaggcgacggttccgaaaagaagaagcctggcttgtttagacgtgcgcttcgtttcctcacccacccacctcacaaacaggtagacaacagccttgcggatatccgtgaaggattaggcctcggggtggacgattcccacgaaggatccaaacccagcaacgatcattctttgctgcatgaaaagcctgaaatttccgtcatgccgaccgaatcaatggcacggctgatcttttatgcgcctgatatggatgggcaaacagaccccggtgaagtagtgtggatttgggcaccagccgatggcccccagcaaccaccccgtaaacgtgccatcgttgttgttggaagaaaccgaaacgccattttaggtctgctcatttcctgcaaccccgagcaccgcactgatgaagactggatcgacattggatctggcagctgggaccctcgaggtcgccaaagttgggtacgactcgaccgcgttctggaggtacccgaattgggtatccggcgccaaggaacagtcgtccccccggggcgctttgagcgtatcgccaaccgcctccgcaacgatttcaactgggtctaacatttatttggtaattgggcaacatca

SEQ ID NO: 344 - protein, 203 aa, Corynebacterium glutamicum
MSSTLARKASGDGSEKKKPGLFRRALRFLTHPPHKQVDNSLADIREGLGLGVDDSHEGSKPSNDHSLLHEKPEISVMPTESMARLIFYAPDMDGQTDPGEVVWIWAPADGPQQPPRKRAIVVVGRNRNAILGLLISCNPEHRTDEDWIDIGSGSWDPRGRQSWVRLDRVLEVPELGIRRQGTVVPPGRFERIANRLRNDFNWV

SEQ ID NO: 345 - DNA, 742 bp, Corynebacterium glutamicum
  CDS (101)..(712): RXA03010
ttatattaatcaaacaggaaaatgtcagagaagaaggcatatctcaaggaaacttggcagctttagagtttcgatcaattattcacgtgcggagtagctgatgtcacaaggatttacccaaccacccgggggaacgtttggttcttcctctggcggattttcaggcgggcaatcaggtttcggtggaggctcccaaaacagtggttttggtggctcttcaggcggtttctctgggggttcatcgaatggctcgttcggcggttcaactggcgggtttaccccggccggagcaacgtcaaacccatcgggcttttcgacgccaaaggttgcagaaagcccagcgccggggcgctcatcggggcgaaaaagagctggtgggcgccttcaatcggcacccactgaatggattcttccgggcctagttttagggctgatcagcctgggactcaatgcgtggattaccttcggtgcgccagtggccaccgataatctttttctcatcgttgctggaattgcgtgggtgttggcaggaattttgagcgtgctgtccatcggcaagtacatgtcagcagtaaatgagcgaaagtcgacaggcttttatacagaagtgccgtggaagaaagcgctctttactgcgacagccgtcctattggtgtttgctgttgtgtggtcggccttggatattgccctgtgggtaggaaagcagtcatggtgaacacgttgaactctaaaaccgtgaatg

SEQ ID NO: 346 - protein, 204 aa, Corynebacterium glutamicum
MSQGFTQPPGGTFGSSSGGFSGGQSGFGGGSQNSGFGGSSGGFSGGSSNGSFGGSTGGFTPAGATSNPSGFSTPKVAESPAPGRSSGRKRAGGRLQSAPTEWILPGLVLGLISLGLNAWITFGAPVATDNLFLIVAGIAWVLAGILSVLSIGKYMSAVNERKSTGFYTEVPWKKALFTATAVLLVFAVVWSALDIALWVGKQSW

SEQ ID NO: 347 - DNA, 1060 bp, Corynebacterium glutamicum
  CDS (101)..(1030): RXA03029
aacacgcctgaggaacgccgtcccatcgcggaggccgtgagcatgccgcacgaagaggtccgcgatttcatttacgcccgccaaaactacttcgatgcccttgaccgccgcgccgaagccatgcgccgcgcaactgggctggcagccgtacgattcccgcgccatggaagattcgatcgcccgccgcctgcaaatggatcacgatgtcaccatcacctcctccaaagaggaatccggcacgctgcaccacttcgaccccgagacgcgtctgctgacaatccacgcacgcctcaaccccgggcaacgcgccttccgcatggccaccgaactcggctacctagaagccaacgacctcatcgaaggtatcgttgacgacggcatctggtccacccccgaagcccgcaccctagccatccgcggtgtggcctcctacttcgccgccgccgtgatgctgccctacaaaatcttccactccgaggccgaaaaatccggctacgacatcgagtacctaggccaactctttggcgtgggctatgagacaaccgcccaccgcttgtccaccctgcagcgccccaacctgcgcggcatcccctttaccttcgtgcgcgtcgaccgcgccggcaacatgtccaaacgccaatccgccaccggcttccacttcacccactacggcggcacctgccccctgtggaacgtgtttgaaaccttcaccaaccccggccaagtgctccgccaattcgcgcaaatgcccgacggacgcaactacctgtggatctcacgcaccgtgcgacaccacgaagcccggttcggcgaagtagacaaaatgttcgccatcggcctgggctgcgaagcgcgccacgccgaccgcactgtgtactcccgcggtttcaacctccaggacctctccaccgccacccccatcgggtccggctgccgagtgtgcacccgcgagaactgcgcgcagcgcgcattcccatccgtccacggccgcatcaacatcgacgcgcacgaatccactatcgcgccgtactaagaaaaggagcttgctttacgacgcacc

SEQ ID NO: 348 - protein, 310 aa, Corynebacterium glutamicum
LTAAPKPCAAQLGWQPYDSRAMEDSIARRLQMDHDVTITSSKEESGTLHHFDPETRLLTIHARLNPGQRAFRMATELGYLEANDLIEGIVDDGIWSTPEARTLAIRGVASYFAAAVMLPYKIFHSEAEKSGYDIEYLGQLFGVGYETTAHRLSTLQRPNLRGIPFTFVRVDRAGNMSKRQSATGFHFTHYGGTCPLWNVFETFTNPGQVLRQFAQMPDGRNYLWISRTVRHHEARFGEVDKMFAIGLGCEARHADRTVYSRGFNLQDLSTATPIGSGCRVCTRENCAQRAFPSVHGRINIDAHESTIAPY

SEQ ID NO: 349 - DNA, 2032 bp, Corynebacterium glutamicum
  CDS (101)..(2002): RXA03053
tattttgtcgtttttccacaatgaggatgccaaggatgaattcggtgctttctggggcgtcaaccgcattccacgcaatctgcctgagggtgtctcagctgtgctttttgagcaagtggagcggatgaagcagtcatggattgatgacaatctgaaaaatactgaccgactagctaagacagaagaatcagacttggctgattcttccactaagtccaaccgccgcaagactgttaagcgtggacttgatcttgatgaggtgatcgccgagcttgatgatggtgcatcatatttgactgtgcacaaccgtctgctgctgcgtggaccaaaccttgagatcttggattcgactgttgagaaaattcgacgcagttttatcgagcacttatcgcgaatggatattgctgcacaccacggtgagcaacgtcaagaactgtcacagatttttggcaaaaatagcaaaaagcgaggtaaaggattccacttcacctcgactgagtttgccggttcttattctttggtcaccaatggtcttaacgatgttgctggcgaatacgtcggtgtcatgcgtggcgatgtcaacaactccgctgtgctttttgatgtggatcgctggtcgggacatgtcgtatgcgcagatagctcgattaatacatcaccactacttaagcgtccccgtgtcgttgacatgtgggggtcgaagatttctcaggcagcgctactgaataaccgtcgcgtagtgcacctggtgctcaatggtgccaagctcgatgaaatgggaccaaagctagaatccatgaccgctcatgtggatatgactagcggagatctcaacatgttcgagctgtttggtaagcaagaagatgagctgtcgctgtattccacacacatggacaaaatcgtgtttatgaccgagcaggcattgggcgataagacctctgagctggcgctattgcgcggaaagctcaaagaaattattacagccttttatgtggatatgaaaatgtgggctcttaatgccggtgaaaaccgtgacaagctgcgtcttgttggtgtgcctcatgagcagatcccgttgctctctgtcttcgtgtcctatttggatcaagaatatgagcgccagaaatatgagggaaccaaagaccctgaaatgtttcgtgccatttctgtgctgcgactgacctataaggatttgctcgatactcatggcgatctgtttaatcagcacacggcagatggcattgattctgtgaactctgcacgccgcgtgatctatgatttttctggagtgctgcgacgtggcgcaggtgtcgcgatggcacagctggttaacgtgattggttttgctgtggagacgcttggtcaaggcgatgtggtcatcattcacggtgctgatggcattgtcgatgttgatgttcaggattatttggctaatcagttcgcatatatggctgagcgtggtgggcgagtggcgtatctctacagctcgatggacgcgatgcttggcactgttggcttcaatcaattccaacgtgctgcgtacaccattttgggcccgatgaacgttgactcggtggatacttatcaatctctgattaatagtcagatcccgatggacttggcacggttggtgacaacgcagaattctggtgcgagctatttgcgccgaggatctaccaatgtggtgtttgaaaccaaccttgcgttgggcgttaatccttatatggagcagcgtcgcaagattgaagcacagcgaggtcagcgacgatccaagcgagacaagcactacggtggtggcacgacgatggtgggcacagcggatcttgatgttgtcgcaattcaggcgaaggccgagcaccgcgaagagcgctttgatgagaaatctgcgcgcaagatgaaggagcttgatgatgtagaagcgaaagaactagctttgaaaactgggccgaagaatcttgatgatgcgcttgcacaggtggagaagaagcgcctggcgaagcggtagttgttggctgtggtgaataaataagca

SEQ ID NO: 350 - protein, 634 aa, Corynebacterium glutamicum
VLFEQVERMKQSWIDDNLKNTDRLAKTEESDLADSSTKSNRRKTVKRGLDLDEVIAELDDGASYLTVHNRLLLRGPNLEILDSTVEKIRRSFIEHLSRMDIAAHHGEQRQELSQIFGKNSKKRGKGFHFTSTEFAGSYSLVTNGLNDVAGEYVGVMRGDVNNSAVLFDVDRWSGHVVCADSSINTSPLLKRPRVVDMWGSKISQAALLNNRRVVHLVLNGAKLDEMGPKLESMTAHVDMTSGDLNMFELFGKQEDELSLYSTHMDKIVFMTEQALGDKTSELALLRGKLKEIITAFYVDMKMWALNAGENRDKLRLVGVPHEQIPLLSVFVSYLDQEYERQKYEGTKDPEMFRAISVLRLTYKDLLDTHGDLFNQHTADGIDSVNSARRVIYDFSGVLRRGAGVAMAQLVNVIGFAVETLGQGDVVIIHGADGIVDVDVQDYLANQFAYMAERGGRVAYLYSSMDAMLGTVGFNQFQRAAYTILGPMNVDSVDTYQSLINSQIPMDLARLVTTQNSGASYLRRGSTNVVFETNLALGVNPYMEQRRKIEAQRGQRRSKRDKHYGGGTTMVGTADLDVVAIQAKAEHREERFDEKSARKMKELDDVEAKELALKTGPKNLDDALAQVEKKRLAKR

SEQ ID NO: 351 - DNA, 754 bp, Corynebacterium glutamicum
  CDS (101)..(724): RXA03098
gaccgttttgtcgatcgcaccgctgctggctcgcaccatcaacgagatcttcgaaaacggttccgtcaccaccctcttcgagggcgaggcctaaacacccatgcccaccacggacgtcttcaaccgcgtccggttggcattggaacctctagctgatcccgcacgtgccaccggaatggcaagctacatgcgggatcagttttcttttctcggcatcccatccacccccagaaaagaagcctgcaaacccgtgctgtccgcgctaaaagagttggacactgactttgtctcagactgctttggcgcagctgaacgggaataccagtatgtcgcctgcgatcacatcaatcgcgtcggcatcaccgatctaggttttgccaaagcattagtgcagaccaaatcctggtgggacaccgtcgattccctagcaaaaccgatcggcgccaaacacgatgatgatctgatgaaaacgtgggcgcttgatgaggacttctgggtgcgccgcatcgcgatcatccaccaactgggccgcaagaaaaacaccgacgctgccctgctggcctggatcatcgagcagaacctcggctccagcgagttcttcatcaacaaagcgatcggctgggcactgcgggatttcgcccgccacgaccccagctgggtccgggcttttgtcgacgccacggacctttccccactgagccggcgagaagccctgaagaatatttagccctcaggcatcatctgagcgagtgcc

SEQ ID NO: 352 - protein, 208 aa, Corynebacterium glutamicum
MPTTDVFNRVRLALEPLADPARATGMASYMRDQFSFLGIPSTPRKEACKPVLSALKELDTDFVSDCFGAAEREYQYVACDHINRVGITDLGFAKALVQTKSWWDTVDSLAKPIGAKHDDDLMKTWALDEDFWVRRIAIIHQLGRKKNTDAALLAWIIEQNLGSSEFFINKAIGWALRDFARHDPSWVRAFVDATDLSPLSRREALKNI

SEQ ID NO: 353 - DNA, 1729 bp, Corynebacterium glutamicum
  CDS (101)..(1699): RXA03113
gttggatcttgcattgaaaaaatgaaaacctcgtcgggaatgcaacttgggatcacgtctcgggcaagaaacgtccttaaaaaaaggggagtgattgtgagtgcttgatttcttagctgcgaacccgctgattgcgctggtggttattttggccgttggtttagcaattggtcagattagggtctttggcctttctttaggtgccgccgcggtgctgtttgtggccctggtggtttcaactgcaaataccgacatcgtcatccccatgattgtttatcagctgggcttggcgatgttcgtttatgtcatcggtttgtccgccggaccagcatttttcagtgagttcgctaaaaagggctggaagctcaccatctttatgctcctgctgctggcaacactgattggtttggcgtgggtgcttattaagtcactggggcttgatgcagcgatcggtaccggtatgttcaccggcgcgctgacctcgactcccggtatggcagcggtcgtggaattgattgaaggaatcgatccaagccttgccagtgaacctgttattggttattccttggcatatccgggagccgtgctgggatccattgtggtggccgcggttggagcgaaactgctcaaagtaaatcaccgggaagatgctcgaaaagaaggcatgatcaccgcaccgctggtgtggaagggtgtgcagctcaaacctggaatcacaggcagggtgggagatcttccacgccttgcaggtgaaagtatcatcgcaacccgcattgtggatgatccacatacacaccgcctcgcggatccagatctgccgattactgaaggcatggaactgttgatcaacggcactgaagaagccgtggatcgggcaattaaggcgttgggtgaagaacgcgaaaccaaaattgaggacacagagctgatctacacccgcctgacggtatctagccctgaggttgcaggtagaaccgttgctgagcttgatactgtagctcacggattcatgattgcccgtatccgccagggcgattctgaggtagtgcctaaacctgacaccgtgatcaactactctgaccgcatccgcgtggtggttgctcctggtcgtgtggctgaagtgcgacgattcttaggggactctgaaaagtcccttgctgatgttaatctgctgcctttagccatcggattatctcttggcctgttgttgggcgcgatcccgattcctcttccaggcggcaccacgatgtcccttggctttggtggcggcccgattattgccggcctgattttgggagcactcaagcacacaggaccgctgacgtggcagatgccgttccacgccaaccgcacgatctccaccttgggcctggcgctgtttttggctggtgtgggtacctctgcaggtgcaggatttagagctgcgcttaccgattcctcctccttgatctacatggccggtggcttggtgatcaccttggcctctgcgctgctgtgtgctgtgatcggcatgtgggtactcaggttgaggtgggatgaagccatgggtgttgccgctggcaccaccacaaatcctgcaattatttcctatctgaatgggcaaaccggaacggatcttgccaacaggggatatgccactgtgtaccccacggcgatgatcggtaaaatcctcggcgcgcagatattgttcttgctgctctaaggtgatttttgggcagtggtgggggtg

SEQ ID NO: 354 - protein, 533 aa, Corynebacterium glutamicum
VLDFLAANPLIALVVILAVGLAIGQIRVFGLSLGAAAVLFVALVVSTANTDIVIPMIVYQLGLAMFVYVIGLSAGPAFFSEFAKKGWKLTIFMLLLLATLIGLAWVLIKSLGLDAAIGTGMFTGALTSTPGMAAVVELIEGIDPSLASEPVIGYSLAYPGAVLGSIVVAAVGAKLLKVNHREDARKEGMITAPLVWKGVQLKPGITGRVGDLPRLAGESIIATRIVDDPHTHRLADPDLPITEGMELLINGTEEAVDRAIKALGEERETKIEDTELIYTRLTVSSPEVAGRTVAELDTVAHGFMIARIRQGDSEVVPKPDTVINYSDRIRVVVAPGRVAEVRRFLGDSEKSLADVNLLPLAIGLSLGLLLGAIPIPLPGGTTMSLGFGGGPIIAGLILGALKHTGPLTWQMPFHANRTISTLGLALFLAGVGTSAGAGFRAALTDSSSLIYMAGGLVITLASALLCAVIGMWVLRLRWDEAMGVAAGTTTNPAIISYLNGQTGTDLANRGYATVYPTAMIGKILGAQILFLLL

SEQ ID NO: 355 - DNA, 811 bp, Corynebacterium glutamicum
  CDS (101)..(781): RXA03184
taccaaaacaatctgccgattaagtaggaagtccccaatgaccgccgttttgctcctcactctttttctatctctttttattggcatttcgctaggactgttgggcggtggtggttcgatcctcactgttccaattctgacgtatgtggcggggttggagcctcgtgaagctattgccgcctcgctgtttattgtgggcacaacgtcgctggtcagtgccattagtcacgcaagaaatgggcgggtccggtggaagactggcctgctgtttggtgccgcgggcatggttggcgcgtttggcggtggcgttctcgggggctacattcctggcacgattttgatgatcgcgtttgcgctcatgatgatcgccacgtcgactgcgatgttgcgggggcgtaagcagaagaagggggcgtcgaaaagctctctttggcgcgtccttgttgatggcctggtggtcggcgcggtgaccgggcttgttggtgcgggcggcggctttttggtggtgccggcgctggcgctgctcggcgggctgtcgatgccggtggctgtgggcacgtcgttggtggtgatcacgatgaagtcgtttgcggggcttgccgggtatctgaccagcgtgcagctggattgggggctggtgctgatggtgactgcggccgccatcgtcggttcgcttgccggttcgcgccttgcggggcgcgtgcctgagactttgctccgcaaagggttcggggtgttcgtgctggtcatgggcgtgttcgtgctcggcttggagcttttataagcttttcgacgtctccctccggcgaaa

SEQ ID NO: 356 - protein, 227 aa, Corynebacterium glutamicum
LGGGGSILTVPILTYVAGLEPREAIAASLFIVGTTSLVSAISHARNGRVRWKTGLLFGAAGMVGAFGGGVLGGYIPGTILMIAFALMMIATSTAMLRGRKQKKGASKSSLWRVLVDGLVVGAVTGLVGAGGGFLVVPALALLGGLSMPVAVGTSLVVITMKSFAGLAGYLTSVQLDWGLVLMVTAAAIVGSLAGSRLAGRVPETLLRKGFGVFVLVMGVFVLGLELL

SEQ ID NO: 357 - DNA, 601 bp, Corynebacterium glutamicum
  CDS (101)..(571): RXA03316
tctgcgttaagttcgacttcttaacaccgacttcagtgagaaaacctgacatcgccgtatttcccaaacgcaactgtgtgctgagataagatcagtaatcatgacttacaaagcagactatgatcttgactttgaaaaagtagtcttccgcatgtcacagctgtttgaagatctcatcccgtcagaaaacgcctacgacccatacaaaaaatcaacgtggccgactctgaccatggctgcaacatgggtacaggacgactgtctcatagttgtatttagggctgatccaagaagagttgcgccaatggatggtgcgactttcgtgggctacttttgcaagatttacccccaatacattcctgacaatatcgaatttggggcagtagagctaatgtatgccgactggatggcaggtgatgggtttatttggaagatcgatctcaaggctccgcaaaagatacattggagaaatgcattcgatggtctaaaagctccggcagatttagaggaattattggactacgccgcggagattccgatgtggttaaacccggaaattgaaaagtggatgtagccagcttcaaatttgaataccccttga

SEQ ID NO: 358 - protein, 157 aa, Corynebacterium glutamicum
MTYKADYDLDFEKVVFRMSQLFEDLIPSENAYDPYKKSTWPTLTMAATWVQDDCLIVVFRADPRRVAPMDGATFVGYFCKIYPQYIPDNIEFGAVELMYADWMAGDGFIWKIDLKAPQKIHWRNAFDGLKAPADLEELLDYAAEIPMWLNPEIEKWM

SEQ ID NO: 359 - DNA, 1213 bp, Corynebacterium glutamicum
  CDS (101)..(1183): RXA03343
ccgcgctctgatctggtacttctgagatagtcagcaaatctgatataggaaaactccttatcagaggaagtatagattgtgaattttgaaggattacgcggtgcatactcgtgggttagtttctctcttaagtcttatttttcttttcgttctttcagggtgtggagggaatgccactaccgctgatgaagctgctgaaagtgacgttgttacttcaagtagcgcacctccaagtaaacgagctctagatgttggagaagcagtagagatcccaggggtcgtgctcacggtaaacagcgtcacacagtccgatcagctcatgttgtactcagaaggcagtgcgcgtggatctgagccgagagaacagcggaatgctgcgtccggagaaaagtttgtttcggtggacactaccgtgaagaattcgagctctgatccttgggatctttcatgtggtcacgtattacagacatggctcctcgaggacgaactagatgatcaacaaggtgaccaagaaaagaaatttagccctatcgacaatcttgatcagatttctggtaatccggagtgtggtgtgcttttagaagtgggtacagaaattgaaatgacgtggtcttttactattccagatgacatagaaatcactcactttggtttttctctttcggatagcacttccaatgacttggccattatcagccttgggggtgcaatagagacatcgtcggccatcacaacaactgaagttatagcaccggaaaatgacacggaaacgctgctagagataactccggttgactgtcaggtcggccttggccccatcgttacttcttggtcggatggaacggtcggaggttggtctcagcactgtcaggacgtgcatgatgaggtacttgccggtgaagtcgcagcgaataccccagtatgtgacggagttgtatgcacttaccccagtggcgccacaatgccggatccaaatgcacctcaaatcccttcagatacgagtggtgcagtgtgcgatgaaaatcagtgtgtttaccctaacggttatatcgcccgaattggggatccgaatgttccgaactatctcaagcctggcaactctccgtgggtacaaggacagattgattttcagaattgcctagacagtgggaaaactattgagcaatgccgtgaagaactgaactaggtcagtcttaagaaatcacccagcccg

SEQ ID NO: 360 - protein, 361 aa, Corynebacterium glutamicum
VHTRGLVSLLSLIFLFVLSGCGGNATTADEAAESDVVTSSSAPPSKRALDVGEAVEIPGVVLTVNSVTQSDQLMLYSEGSARGSEPREQRNAASGEKFVSVDTTVKNSSSDPWDLSCGHVLQTWLLEDELDDQQGDQEKKFSPIDNLDQISGNPECGVLLEVGTEIEMTWSFTIPDDIEITHFGFSLSDSTSNDLAIISLGGAIETSSAITTTEVIAPENDTETLLEITPVDCQVGLGPIVTSWSDGTVGGWSQHCQDVHDEVLAGEVAANTPVCDGVVCTYPSGATMPDPNAPQIPSDTSGAVCDENQCVYPNGYIARIGDPNVPNYLKPGNSPWVQGQIDFQNCLDSGKTIEQCREELN

SEQ ID NO: 361 - DNA, 556 bp, Corynebacterium glutamicum
  CDS (101)..(526): RXA03377
ttcctctccagggcacaatttacccccattgaactgcatcaatgggggttcatcatttcctccaaagtgcaaaaatacacgcttacgtacactgtagatcatgctacagagcccgaagagagccatcggcctgtccgccgcattgctcacgctcaccgcgtgtggggcaaacgacgagctttccagttatctcacctccattgagacagctacagctcaagtttccctcaacgacatttacaacgatcaatggtccgaatttgcagtcgtttgcccctacacgccaagtgactatgcgaaggcggaacttgacgtcggagataccccctggccagataagtggccagacgaacaaaccaattttcttctcctaaaaagtgacacgggcgaatacaaatgggtgcgatatcgcaggtcaaacctcgacttttgctctgaaccaaggattgacttcacgctcttccccactgctgcaacgctggaattcaccgctaacgatggctggattctcgagtctgtacacccttgatcaaagcccgagtgttccgtagattaa

SEQ ID NO: 362 - protein, 142 aa, Corynebacterium glutamicum
MLQSPKRAIGLSAALLTLTACGANDELSSYLTSIETATAQVSLNDIYNDQWSEFAVVCPYTPSDYAKAELDVGDTPWPDKWPDEQTNFLLLKSDTGEYKWVRYRRSNLDFCSEPRIDFTLFPTAATLEFTANDGWILESVHP

SEQ ID NO: 363 - DNA, 304 bp, Corynebacterium glutamicum
  CDS (101)..(274): RXA03463
atagttcgcgctgttttaagaggttgagattctcaaacgggtgtttgtatagatcacattgcgatcatgccttagacgcgattctgagagggcaagttttttgagttccggttccaattttaagctcgaccaaaccacagtgcccacgaactggaaattcgacaactctgggcatttgtgtctggtttcaagccgtcgaaaccagaccacgctgcccatgaaccgggaaaacctgagccgtgggcagtgtggtttggtcatggcgttcgaatgctgattcgggccagacaggcgtgacaagatt

SEQ ID NO: 364 - protein, 58 aa, Corynebacterium glutamicum
LSSGSNFKLDQTTVPTNWKFDNSGHLCLVSSRRNQTTLPMNRENLSRGQCGLVMAFEC

SEQ ID NO: 365 - DNA, 496 bp, Corynebacterium glutamicum
  CDS (101)..(466): RXA03506
cgcacaaagtgggtgtgaaaactccgcttcatgaccttatttatgctggtcttaagctgaaagaagaggaaaattcactttagggatagaatcaagatccatgatcgttacatccaccgcgcgcgtttctatagatcgtccctcgcgctatgccaaacagttaactagccatttgggtgaaaaactgagcacaagctgggacccggaggcagaacgggggtctgttgtcttggtgggaaagggcccagaccacgaagaccagcggtttgcttttgatggatctgctacctgtgatctggttgccggcgacggcgtgctgttgctccacattgaatcgcccgccagcctggttgagcgttttgaaaatgtcatcggcggccatctggtcggcttcgctcggcgcgacgagatgaagattgcttttcgacgtggtgatggatcagaagggctgtcttttgagtccgtctaacataatccgcatcgcagctgttctaat

SEQ ID NO: 366 - protein, 122 aa, Corynebacterium glutamicum
MIVTSTARVSIDRPSRYAKQLTSHLGEKLSTSWDPEAERGSVVLVGKGPDHEDQRFAFDGSATCDLVAGDGVLLLHIESPASLVERFENVIGGHLVGFARRDEMKIAFRRGDGSEGLSFESV

SEQ ID NO: 367 - DNA, 757 bp, Corynebacterium glutamicum
  CDS (101)..(727): RXA03523
tctgtaattgcggtaattcgcttagttgaagctgttgaaattacgagcacttctaaatacctggtagatggattatttagccccggaaggggctatttttgtgtctaaacccgagggtaatttgggaggagcgttaagtactactgacaggttaaacaaaggttttgccaggtgtcgggacccgctcgaagctgaaaatgtctactgggaataccgcaacaatggagtctggatcaggattaacaccgacaacaacttccaggtcactacggcagatggactcacctccttaaccgtgactgatacggcagttgatcagtctggagcaaggttatgtgccgttgctactaatgcttctggccccacgatgtcgagggaagctgttctcacggtgcgttctgcaaccgagatccctgatgatggtctgagcattgatgatgttgtactgcgttggggtattagtgaggaagtacaatcacgaccactatttggtgactccaactacctatccgctggtgtgtctgatggatctgcattgacctacgagtcaactgatagggatgtacgcatcatccacagggtgctgttgcaaagttgggccagggtcgaaaagcccaacctcaagacattagttgtccttgctccggggtgcttaagctgtctcgaatatccggctgacgatcaccgcgtctgggttcgggtgcccgtgaggtcaaacatcgttccctgaccctttccgcaatgaatgcatcgcctc

SEQ ID NO: 368 - protein, 209 aa, Corynebacterium glutamicum
VSKPEGNLGGALSTTDRLNKGFARCRDPLEAENVYWEYRNNGVWIRINTDNNFQVTTADGLTSLTVTDTAVDQSGARLCAVATNASGPTMSREAVLTVRSATEIPDDGLSIDDVVLRWGISEEVQSRPLFGDSNYLSAGVSDGSALTYESTDRDVRIIHRVLLQSWARVEKPNLKTLVVLAPGCLSCLEYPADDHRVWVRVPVRSNIVP

SEQ ID NO: 369 - DNA, 559 bp, Corynebacterium glutamicum
  CDS (101)..(529): RXA03572
accttggtgcactgcaggggttgttttctatgtgccaacgagttcttaagaaacacaacgacagcaaagctgcgttcgggagcatgtgtgaaccctcgctgtgcccgcacttgcctgcatacagctcactcaacaacacagaaagaaccttttaccatgctcaatgcactcaacgctgtccttgatgttgtcgaatctgctcaagggctggtctttgtcgtcatcactgctagcctgctcactcttgctgtcatctacatcaagaactatccccacgcgccacagcctgctacccaacacaccactgaccaaccaactgtgccagagccgctgcagattcttgacaaccctgctcagacaactgctgctggtctacgccatgaccttcatagcgatctctacgccgaagaaaagagcgcataatctgtgtctcgatgttgcctgggatgctgatgaaaacctccctgttgtcgttgaagtcaatcctgtagcgatgcctgggtgttgcgcctcgggcgcagctgggtgctaacttagcaccgcatcaacgcagcgaagc

SEQ ID NO: 370 - protein, 143 aa, Corynebacterium glutamicum
VPALACIQLTQQHRKNLLPCSMHSTLSLMLSNLLKGWSLSSSLLACSLLLSSTSRTIPTRHSLLPNTPLTNQLCQSRCRFLTTLLRQLLLVYAMTFIAISTPKKRAHNLCLDVAWDADENLPVVVEVNPVAMPGCCASGAAGC

SEQ ID NO: 371 - DNA, 505 bp, Corynebacterium glutamicum
  CDS (101)..(475): RXA03577
aattttgcaagcgttccgaggcggccttgcaacgtcttaccccaaatataatcaaattagagacctagtcgactcaagtagttaagaggaaacaacaataatgttacgaaaagtatccattgcattggtcgcatccgccgctatcttggtatctgtacctttcgcacaggcatcgacctcagtggcactgtcgtcagaaagctcagattctctgggaagtattccaaacgatttaattgggggtctagccggttactttaataaagatcttacggaggaacagcgcgatgctattcgcttcggccccaccacagcacaagaagcagaacagtgcttagcaaaatacggacttggcggtgaaggcccgtggcctactatcgcggtgtaccctaactgctctttcgagacaattgaacaagatttctatgatcaagcggtagccgagactctcgcagcaataggcatcgggagctcttaaacaatcaaaggtacaacccaaaaaaca

SEQ ID NO: 372 - protein, 125 aa, Corynebacterium glutamicum
MLRKVSIALVASAAILVSVPFAQASTSVALSSESSDSLGSIPNDLIGGLAGYFNKDLTEEQRDAIRFGPTTAQEAEQCLAKYGLGGEGPWPTIAVYPNCSFETIEQDFYDQAVAETLAAIGIGSS

SEQ ID NO: 373 - DNA, 379 bp, Corynebacterium glutamicum
  CDS (101)..(349): RXA03584
gcacatcatttagacctgatctgtctcacttgtggtcactccccgtagggtgggtagctccggggcttgagggtttcgtggagcgtaattcagaggcagcttgaaccaccgctctttgagccggaatctccactctttagggtggagaggatatcaaaagatgggagatcatggtcgaaaaagtgagttcgcaggaatctcccggaggaagtcgcaccggcttatcacgtcgatttatggggcttgttgccggcaggagtcactgtatgggtttgcatgtaaaagtaaaaaaataacccccgcagcagcttgtttaagctactacgagggttattttttgtggatgtgttagtcaaatggcgcgagttcccatactgca

SEQ ID NO: 374 - protein, 83 aa, Corynebacterium glutamicum
LNHRSLSRNLHSLGWRGYQKMGDHGRKSEFAGISRRKSHRLITSIYGACCRQESLYGFACKSKKITPAAACLSYYEGYFLWMC

SEQ ID NO: 375 - DNA, 3919 bp, Corynebacterium glutamicum
  CDS (101)..(3889): RXA03591
aggactgctccgcaaacctctaacaacacctgctactccccctgcagcgccgctcaaccccacaccacccaccccttaacaaccacaagaaagatttatcatgtccgctccaaccatctaccccggcaccaaaacatctattgatccgatcaccatggatgacgctcgcatcatctttttcgatattgagtcgctccacaatattttcacggtagcaacctacgattctctgtcccaccacgtcgatgtcttttacctgctcgatcacacaaccagccctcagatcacggtgctgccgcactcaatggattatttcgatcaaacgcgcagcgatgctgttatggctgccatcattgagcaaaaccctgcgttcgcagaaattaaaggctcacccattacaaccgcagatgtagccctccacaatctcggtgacaccaacgccaaccgacgctggcagtctaacgtgctgcttgcccggctactcgggggtattagtgtgcgcggagaggtacctgagcaccagagccacaaccatctcgccaagcagtttgccgaggcaaccttggtcaccagggacttcgatgtgaattatgatccaacaagcgctcacccttttactgctggcttcaactcgatcaactatgacaccaccttgctcagcctgtacttcgcaatgttgacctcaaatatcggaagtacaccgacgtatttcccggtgatcaccgcacaggaacttcgtgcgcataacgacaagctctttagccctgagttcatcaaaaacatgccaaagtatctctgggatcgcgacagcggtgctggactcagagctgcatcgggtttccgcaacgccatgctcaaatcgggtcgccacattgatattcaacgcctcaatgaaaaacagctctttgttggactcaagcgcctgcttggtctcctcggtcaccagattctcgaatctgatcgtctctctggtgatgatgcccatgttgatactaacgaggatgtacttgatctcattgcctacaacgtctcagacgtggtgggcaccagactgctcgctgaggacccggtgtactccggctctttcgatctgcgggcaggtctactgagcacctacccagagactgtttttgatcatgatggtactttccgtcagccatccacgcagatgcgtaaagatcgcctaacgattaatacctcatcagctcagttcgcagcgcgtattttggcgccatatcgcccactccgcgatgtccctgatgcgattggcgacatgccggtggtgtcttacttgtacccggatgcagcagtcgccgaagcaacaggtcaaaaacaagtcaacgtgcttgatgagtcaaagaagttcttctatgacaacatcaccgacccggaagcacgtgctgcctttgatgaggtctttgctttttacgctgatattgagggtcgcaacttcaacagtcacaatgaggctattgatacccagattaaccaattacgtgcttatctcaaccaggttgtcgcattcgatgcagctgggtatgcgctctatgatgtacgtacacgttttgagcagatcttccccaaggatcgcagctacatcaacgatgctacggatatgacccctcgcgcagtatcgagctttgacgatctggttgcactctgtgatgatattcgcggtgtacttgatcgaggtttagagatctcatctccgaatcatcatgagatggtggatgctatgcgcaagcagctgcactatattcaggcattttaccgtgcctggggacccattcaacgccgcttcaatgacgctgacccagcggtgacccatccgcatctcacagtgatctacccaccgctcacccctgcatccgcagagaaattcaacaagatcacctcagtcgctgctgtgagcaagcgcccaaccaccctgccgtatttccgtgcagatggttcacctactcgtggctttgctaacttctccacaggaggtattcacggtgcggaatacaacgaagatcgttttgaccatgatcaagatctacacacagtggcaacccgtgaattcttcgccattcttgatgcgacattagcggctctctacgcagcccaccaagccgaacctgaatcggcggactaccagattgcacaagacgcactcgcctgggcaaagaatgtacttagcgatcaaaaactcatcgctaagtcgcctcagttatacaaccccgaaaccggggtcacctatgagtgggagtttgtcgctcaagcagcatggtggattcgcaacaaaccggttgaggttattttaccaacaggtgaatcaatgaccgtaaaacacaaatctgtattggcatctgcgtcctacccactccgagacaacgtggcgtactggcgtagcgaacccaaaacaccacagctgtttcccgtagcaaaatctggtggttcctcgcttgagaagaagtacaactacacctctgtgggtactgctattcacgaggactttagcagttactatccgctcttgctcaccaatatggctgcatttaccaatgctgacttaggtattgatgagaaaaccgggcgccctcgtgaccgctaccgtgaaatctacgaacaaaaagagatctatggcgcacagcgcaaagacccctccattgatgaagaaacaaagcaacgtctagggattttgcgcgaaggtaccaagttgattcttaactcggccaccggtgctgctgatgctggtcacgacaccccgatcctcatgaacaatcgcgttattgccatgaggattattgggcagctattttcttggagaattgggcaagctcaatcactggctggtgcaacgattatttccactaacactgatggcctgtattccgtactcgatatggggactaaccagcgcgttcttgatgaacacgctacagccatcggtgtgcaaattgagcctgaagaactggatattgtctccaaggattccaactcacgtgccgaatttctcggcaatggctacatcaatgcggccggtgacttggcgtgttgggatggacccaactctcggaactcactagatcacccggcctttgttgaccatgtgctggtgaagtatttccagctcgtcgtcaacaacactgtgccagagattccagaaacacctgagcttgagggtgtaccgctggctcttgatcaacccatgaaccgccacgaagtctcgaagattgtcgccactatgcacaaggaattcgagccgaaaaagctgctgtcgttttaccaaaacattttggcctcttcacgcggttctaataccttcctattctctgtcccctatatccctgcaacagaaggagaagaaacccaccctgcaacagataccagcactattgcgacaccaaccttgagctttgatgcttatggtaataaggccgaggtcatgccgactcaatccactgtggataagcgcgtgccctctttgctgcagtattacacgcgtacattccatgtgcgacaagatacgcagcaggctgtctttgatgttattggcgccaaccccgtgctcatcgccgcagcaaaagctgcatccatatcaccggcttctgctgattcacgtagaaagaagggcctggcctccaccaacgctgacccagtagccaagcatgtactagaaattgcaggagctgatgtggaatcgctgcgccatgaaaaggatctcaaggtcaccaagcacactggccaagacccagcactgcctgtcgtggtctttaaccaaaccatttggcataaccccaacgacgatgtgattaatgcattactgggcgctattgaccaggatgcctacattgacatggcgatctcgtcctacaacaagtcctggcacaacattatcccggcttaactaccgctgggtagaccccttgatgac

SEQ ID NO: 376 - protein, 1263 aa, Corynebacterium glutamicum
MSAPTIYPGTKTSIDPITMDDARIIFFDIESLHNIFTVATYDSLSHHVDVFYLLDHTTSPQITVLPHSMDYFDQTRSDAVMAAIIEQNPAFAEIKGSPITTADVALHNLGDTNANRRWQSNVLLARLLGGISVRGEVPEHQSHNHLAKQFAEATLVTRDFDVNYDPTSAHPFTAGFNSINYDTTLLSLYFAMLTSNIGSTPTYFPVITAQELRAHNDKLFSPEFIKNMPKYLWDRDSGAGLRAASGFRNAMLKSGRHIDIQRLNEKQLFVGLKRLLGLLGHQILESDRLSGDDAHVDTNEDVLDLIAYNVSDVVGTRLLAEDPVYSGSFDLRAGLLSTYPETVFDHDGTFRQPSTQMRKDRLTINTSSAQFAARILAPYRPLRDVPDAIGDMPVVSYLYPDAAVAEATGQKQVNVLDESKKFFYDNITDPEARAAFDEVFAFYADIEGRNFNSHNEAIDTQINQLRAYLNQVVAFDAAGYALYDVRTRFEQIFPKDRSYINDATDMTPRAVSSFDDLVALCDDIRGVLDRGLEISSPNHHEMVDAMRKQLHYIQAFYRAWGPIQRRFNDADPAVTHPHLTVIYPPLTPASAEKFNKITSVAAVSKRPTTLPYFRADGSPTRGFANFSTGGIHGAEYNEDRFDHDQDLHTVATREFFAILDATLAALYAAHQAEPESADYQIAQDALAWAKNVLSDQKLIAKSPQLYNPETGVTYEWEFVAQAAWWIRNKPVEVILPTGESMTVKHKSVLASASYPLRDNVAYWRSEPKTPQLFPVAKSGGSSLEKKYNYTSVGTAIHEDFSSYYPLLLTNMAAFTNADLGIDEKTGRPRDRYREIYEQKEIYGAQRKDPSIDEETKQRLGILREGTKLILNSATGAADAGHDTPILMNNRVIAMRIIGQLFSWRIGQAQSLAGATIISTNTDGLYSVLDMGTNQRVLDEHATAIGVQIEPEELDIVSKDSNSRAEFLGNGYINAAGDLACWDGPNSRNSLDHPAFVDHVLVKYFQLVVNNTVPEIPETPELEGVPLALDQPMNRHEVSKIVATMHKEFEPKKLLSFYQNILASSRGSNTFLFSVPYIPATEGEETHPATDTSTIATPTLSFDAYGNKAEVMPTQSTVDKRVPSLLQYYTRTFHVRQDTQQAVFDVIGANPVLIAAAKAASISPASADSRRKKGLASTNADPVAKHVLEIAGADVESLRHEKDLKVTKHTGQDPALPVVVFNQTIWHNPNDDVINALLGAIDQDAYIDMAISSYNKSWHNIIPA

SEQ ID NO: 377 - DNA, 487 bp, Corynebacterium glutamicum
  CDS (101)..(457): RXA03613
gtatttaggaattgaaacccactaaaaaacagactaagttactaggtgataacaaaagttgtttattacttatgggaatagtgtggaaagtagggtgaatatgtcaattcctggaaatgttagttatgttgcacagggtggcaccggttgggatggtgctgatcagtacaccacgggtgagagttgggatctacagtcgttccttgaaaactcgactgactacctcatgattattggtggttcgctgctggcacttgttggtggtgctgctgtgatttggggctttgtcaacgtgatgcgcaagctcttcggtggtcagagtggtcagcagattcagtggttcaccactattttgctcatcattgtcggtggtgcgttcctagttggtggtatcacacttgcgctgaactttgcgtctggtgcaggcgatacggttaccggtttcggtacaggtggctaagattcagcaccgcacaaaaagcacatt

SEQ ID NO: 378 - protein, 119 aa, Corynebacterium glutamicum
MSIPGNVSYVAQGGTGWDGADQYTTGESWDLQSFLENSTDYLMIIGGSLLALVGGAAVIWGFVNVMRKLFGGQSGQQIQWFTTILLIIVGGAFLVGGITLALNFASGAGDTVTGFGTGG

SEQ ID NO: 379 - DNA, 445 bp, Corynebacterium glutamicum
  CDS (101)..(415): RXA03682
gtaacggtataccatagaaacaatctgtaatcctctaaggagcgcgatgaaagattcgtctaagtttgcgacaaaaaattattctgctcgactgttcttattgctttatgtcttaacggtcgtagtcgggtggatatttgcccttgggaatccctattcagtagtaaccgctttttcaatttttgttggagttggttttgctgtagctgcagttgcttgtgccctaacaagaagagctcccttgtggcttttggggttcttaggtggtgtaggaatcgttcttgtcttgatgggaatctatttcagggtaactcagcctgatggaatcctaactggatatttgataccgattggttttggattttttctcgcagaagcagctgtggcaatagagcgttattggcatcgtcgtcactaagcactgcgttcttaaaggaagagcttt

SEQ ID NO: 380 - protein, 105 aa, Corynebacterium glutamicum
LLYVLTVVVGWIFALGNPYSVVTAFSIFVGVGFAVAAVACALTRRAPLWLLGFLGGVGIVLVLMGIYFRVTQPDGILTGYLIPIGFGFFLAEAAVAIERYWHRRH

SEQ ID NO: 381 - DNA, 1003 bp, Corynebacterium glutamicum
  CDS (101)..(973): RXA03700
agcgaatcggattcagtgatttgcttgcgggcgcagaaatgatttttcaattagacacacttagacacacgtaactaaaacctcagggaagtgactgataatggctaatccgctcagcaagggctggaagtatctcatggcatcgttcgacaacaagatcgatgagaatgcagatccaaagatccaaattcagcaagctacagaagctgcccagaagcagcaccagcagattatgcagcacgcttctcagattatcggtcagcagaagcagcttgagatgaaattgaaccgcttggttactgaccgcgataagttgcaggaacaggctcgtcaggcaattcagttggcagataagtccgcaaacgaaggcgacagtgttaaggctcaggagttcaacaacactgctgaggtttttgcttcccagttggtagctgtggaacagcagttggagcagactactgcgcttcatcagcaggctgaggttgcggcgaaggatgctgttgcgaagtctaaagagtctgagatgcgcctgaaagagcagatgtctcagattgatgctctacgtgcgcaggctgatcaggcgaagatgcaggaaagtgtcactaagtctatggattctttgaatcagtttggcactcaggattcttctgttcctacccttgatgcggtgcgtgagaagatcgagcgtcgatacgcagatgctttgggcgcgcaggaacttacccagaacactgttagtgatcgcatggctgagattgcgcagtccggcaccgatatgcgggcgtcagctcgtttggctgaacttcgcgcggaggcgctgggcacgtccgcaacgcctaagggccagctagaggcaggtgtcgaggatgcggaagaacttatcgacgaaacctccaccccttcagctaccccagaaaccgcaagcccagaagctgatgctccagaagcatccgcagacgagtccgagaagaaataacctaaacacaaaaaactggggctaact

SEQ ID NO: 382 - protein, 291 aa, Corynebacterium glutamicum
MANPLSKGWKYLMASFDNKIDENADPKIQIQQATEAAQKQHQQIMQHASQIIGQQKQLEMKLNRLVTDRDKLQEQARQAIQLADKSANEGDSVKAQEFNNTAEVFASQLVAVEQQLEQTTALHQQAEVAAKDAVAKSKESEMRLKEQMSQIDALRAQADQAKMQESVTKSMDSLNQFGTQDSSVPTLDAVREKIERRYADALGAQELTQNTVSDRMAEIAQSGTDMRASARLAELRAEALGTSATPKGQLEAGVEDAEELIDETSTPSATPETASPEADAPEASADESEKK

SEQ ID NO: 383 - DNA, 406 bp, Corynebacterium glutamicum
  CDS (101)..(376): RXA03803
cggcaaaatgatggccaaaaccaggaaatcttggtgtcgaaagtacaacgaggttaagggaattaacccgagggcccagatctaacggtgagctgccaacatgaggggtggtcgaagcacttcgaccctggagactgggcaaaaccagcccacactgcccacggacctcgaaaagaggacccgtgggcattcctgtctggtttacaggcctcaaaaccggtcacagctgcccacgaaactcgatttcgagatccgtgggcactctcgtttggttgctgtagcaacctgcctcaaagcccggaaatttagcccgctcagaatcgcttctcaggccttgaatgcacgaatccctcacatgttacccatcggggatttctaggcccgcaaatcggcacacagagcatca

SEQ ID NO: 384 - protein, 92 aa, Corynebacterium glutamicum
MRGGRSTSTLETGQNQPTLPTDLEKRTRGHSCLVYRPQNRSQLPTKLDFEIRGHSRLVAVATCLKARKFSPLRIASQALNARIPHMLPIGDF

SEQ ID NO: 385 - DNA, 337 bp, Corynebacterium glutamicum
  CDS (101)..(307): RXA03823
aagcctggttacgctgatggtactgcactcgggagggtgtgggagagtaggttaccgccgaccaaaaacttaaaatagtatggataagcccagaaacactgtgtgtttctgggtttattcgtgtttgagggggtgtggtggatacacatggttgtgtgttcactacaccctctcttttttgtgtttgtgggggtcttgggccccttgtgcacgtggcacctgcgcctgggggcaagcgtcgacaagcaaaaagctcgtaccttctttatttgaggaggtacgagctttatctgtcctggtgaagttttagatttttacagcgatagctggctcagga

SEQ ID NO: 386 - protein, 69 aa, Corynebacterium glutamicum
VCFWVYSCLRGCGGYTWLCVHYTLSFLCLWGSWAPCARGTCAWGQASTSKKLVPSLFEEVRALSVLVKF

SEQ ID NO: 387 - DNA, 1564 bp, Corynebacterium glutamicum
  CDS (101)..(1534): RXA03886
caccatccagatcgctgagctgctggttaagtaaaaacccgccattaaaaactccgcttgagtgctacactttaagcggggttttaatgtttgaggggcgatgggggtcgagcttgtgaagtggaattttccacaagttttaagtttctttagcaggggaaacactgctgatagcactagcgataaagaacatgaaaatgcaacggagctagcggccgaagctttagcggatgtcatttttcagtggaaaaactgggtctaccgacgcgttgatagtgtgcatccatccgaaggagctcgagggagactcagacactccatggattgcgaacctccacctgacccacggcttgcgtacaacgaagttgaacgccgttataacgatattaatgacgtaaagggacaactaatggtcccgctagcgttcattgaaaaaggcccgatgcgtcatcttgatgtctggagaaatgatgggacgagcattcctgtccttggttcggaagaaactggtgaactaatggtggctgtcctcatgctgtttttgaagaaaaatggcatcgagcgaacatctgaacttgaagatgcgatgcgtgcccttgtgatatcaagagaaaagggaaacctagcaaaagcaacgaacctaattgaaagtggggtgtgggagggcaaaacattatgggatagtaatgatcctgcagtgagatttgatgtgggaacaaaagacttgcttttgaatctatctactgattttttgttgatcggtttgttgcccgcggaaacttctggaatcaggcaagttttaaaattttcatatcactgggtggttgaattacctgacagagggcttcttagatcattgtggggtagcgtgtgtgtcgcatttcgagcagctccaatggaaattgaattaccaacacatatgcccacggatgcgaaatcgtaccatcttgaattccacacaccgcctgagttagatactcaagagttatcgcttccagttgattccaagaataagggccatcgggtcggctatccaactgactctagtaggacacctatcgcccatgtgcactcgcatttttccgagataatgaccacaaatgcaaaagtaaaattggaggttcccaaaaggggaatttgggttactgcacttttatcgaatgcactaacagccggaatttttatcctagccttgttgctacccaatgcaactgatgctttgcgtagtgttggaggaaatgcagcggccttgatgcttgcagcgccggcagtatttgtaagctttctcatctttcctaaagaacatatttttgtatcttccatgcttaatccgcttcgtatcgtcgtaggaatatgcgcactactgctctttatgatggcaggaagtcttgtgggtgggttggagcgaccatttcttattcttctgtggtcatttggagctgggttttcattgctagttgttagcgcactagtactaggtccactcctaggaaagttttttgagaggttgcacctgcgccctagtactaagaactgatgtagagtttgtggaaagatgagttag

SEQ ID NO: 388 - protein, 478 aa, Corynebacterium glutamicum
MGVELVKWNFPQVLSFFSRGNTADSTSDKEHENATELAAEALADVIFQWKNWVYRRVDSVHPSEGARGRLRHSMDCEPPPDPRLAYNEVERRYNDINDVKGQLMVPLAFIEKGPMRHLDVWRNDGTSIPVLGSEETGELMVAVLMLFLKKNGIERTSELEDAMRALVISREKGNLAKATNLIESGVWEGKTLWDSNDPAVRFDVGTKDLLLNLSTDFLLIGLLPAETSGIRQVLKFSYHWVVELPDRGLLRSLWGSVCVAFRAAPMEIELPTHMPTDAKSYHLEFHTPPELDTQELSLPVDSKNKGHRVGYPTDSSRTPIAHVHSHFSEIMTTNAKVKLEVPKRGIWVTALLSNALTAGIFILALLLPNATDALRSVGGNAAALMLAAPAVFVSFLIFPKEHIFVSSMLNPLRIVVGICALLLFMMAGSLVGGLERPFLILLWSFGAGFSLLVVSALVLGPLLGKFFERLHLRPSTKN

SEQ ID NO: 389 - DNA, 484 bp, Corynebacterium glutamicum
  CDS (101)..(454): RXA03940
aactcgaccgcttaaacgggcttctagagtgttgatgctttaaggggccgtaaatgtagggttctttggatgggagctaaggccagggctcacttttgctttgatcgggaggctccaagccagcaaaccagacacacgtgcccgcggttcgggtttttcgagttggtgggcactctggtttggtttatcgctttcgaaaccggtcccagttgcccaagtgtttcgatttgaggattcgtgggcacgcctgtctggttggccagaaaaactggccttagacccaaaaaaccagactcgctgtatggctgttagacgcgcttccgtgactcactttaggggaacgttccttcgaaaaactcgaccctttaaacgggcttctagagccttggaaccatttggacttcttcggagtctaaccagagtatggacaacaataattcctacctctggccagtaacctacgacgaagtctcccatgaattaa

SEQ ID NO: 390 - protein, 118 aa, Corynebacterium glutamicum
LIGRLQASKPDTRARGSGFSSWWALWFGLSLSKPVPVAQVFRFEDSWARLSGWPEKLALDPKNQTRCMAVRRASVTHFRGTFLRKTRPFKRASRALEPFGLLRSLTRVWTTIIPTSGQ

SEQ ID NO: 391 - DNA, 418 bp, Corynebacterium glutamicum
  CDS (101)..(388): RXA03947
acgcccccaaatacctgcgagtcacataagtattcccaaacaattcactttaaggggtcaacatccccaaaataggtccacatatggatgaggcccgtttatggccttaaaaacgattctgaggcacctacggtttgttgcgaatgagacaggtgtgattcctgcaggttccctgatcaaggattcaccacaatcctgtggccagaccttaaaatcgaacagatttttgcaccacaggccgtggaagttgcaaaaatccaccacaaaccgccccctaatcagccatttgtggtggatattcgcacattctttcgctacgccctcaatatggaaatttcgggccctaattagctgcggtcgccgagcaaattggcggctccggcgtcgataagctgttgtgcaacgagctcgccgagct

SEQ ID NO: 392 - protein, 96 aa, Corynebacterium glutamicum
MALKTILRHLRFVANETGVIPAGSLIKDSPQSCGQTLKSNRFLHHRPWKLQKSTTNRPLISHLWWIFAHSFATPSIWKFRALISCGRRANWRLRRR

SEQ ID NO: 393 - DNA, 712 bp, Corynebacterium glutamicum
  CDS (101)..(682): RXA03955
agcgtgccggtgcaaaccaaatcctcacgtactttgccgttgacgctgcccgcgcactgcgaaacgcttaacaagaactaactgattagtaggactccccatgagcatgcttcccaatctcacaccgaagaaatctgccccgccttcatcttctgcttctgcgaaaaatgctggagaaaagaaggaagacaccgtcaagctcctgattcagatgtgggctgtgatgatcggtttggagctgctgcaccagatcttaaacgtggtgatgagctttacggacccgactgcgctgcggactgttgccaaagaacaagcagcagcacaggggctttccgatggcattgttaacgccacagtcatcgcagcaatcttggtcatgggattcttcaacctcattgtgattgccattttgtcctggatggtggtgatggtgaaaaaccgttccaaacgcctaccgacggcattcttgctgctcaccatcttcagtttcttctttatcctaagagtcttgatgctgtttttcgcctcacctggtgggactgatgttccaatggcactatttgctatcgacggttgtgtacaaatcctcgtcggagtgagcgccggtgtggcatatgcgctctcgcgcactgagcagcctgtcaaaatgctcaccgactacgcaccagaagacgctaaacggtaagtactgaagaatttttaaagacgacgg

SEQ ID NO: 394 - protein, 194 aa, Corynebacterium glutamicum
MSMLPNLTPKKSAPPSSSASAKNAGEKKEDTVKLLIQMWAVMIGLELLHQILNVVMSFTDPTALRTVAKEQAAAQGLSDGIVNATVIAAILVMGFFNLIVIAILSWMVVMVKNRSKRLPTAFLLLTIFSFFFILRVLMLFFASPGGTDVPMALFAIDGCVQILVGVSAGVAYALSRTEQPVKMLTDYAPEDAKR

SEQ ID NO: 395 - DNA, 322 bp, Corynebacterium glutamicum
  CDS (101)..(292): RXA03975
agacgcatcaatcgcttcgtggtcgtaggccttgagcctaatgcggatcttttgtcccgccacgcttatcctcttcctcgctcgtcccacatcttccattttggaaaagcggtgggaattcgcttcattctttctctataacgttgtccgggcttggggctcgggcgcaacgccagtgtttaacctgacctgtcaaatgcttctgacattggatcacgggcgctgtacaaataaaacgctccacgatgaacccaacaatgaagtcagggaaatcggaagggaccaaaatgcgtgatctaggccctaacgtaactgccgctgt

SEQ ID NO: 396 - protein, 64 aa, Corynebacterium glutamicum
LEKRWEFASFFLYNVVRAWGSGATPVFNLTCQMLLTLDHGRCTNKTLHDEPNNEVREIGRDQNA

SEQ ID NO: 397 - DNA, 604 bp, Corynebacterium glutamicum
  CDS (101)..(574): RXA04007
ggccggtgggcaagatgcttctggaaatataatgatgtgctcaggcggacaatgggtctatgggccataaatctaaaatcaaagagtgcactcctgcagcatgggttttgggaaggcgatactcttagaaattatggatccgatgaacagctacaacaccatgaagtcccacgtcaccccaattccaacgccggtgagcgtgcggctgagtagctcggtattagtaggtgctgccatcgcttcattaaccactgatctagccccggccgtaaagttttctgtcactggagttggtctggcactcgcgctgctcatcgcttttgcgcatccttaccgtggggagatgaggatgtaccgcttccaaaacaatatttcaccagtccccaccattggccaggtgatgccactatttttcacatggctggcgctgatgcttgcaccgattatttcaggagcgccattgtgggcaacgattctagtgttcctggcagctaccggctggatgtatttaacgttcccccacgtggatggcagccggaagctggcgttcgctgaaggcccccgccgaaacacctaaacggaccacccaggaaatcgacctaag

SEQ ID NO: 398 - protein, 158 aa, Corynebacterium glutamicum
MGFGKAILLEIMDPMNSYNTMKSHVTPIPTPVSVRLSSSVLVGAAIASLTTDLAPAVKFSVTGVGLALALLIAFAHPYRGEMRMYRFQNNISPVPTIGQVMPLFFTWLALMLAPIISGAPLWATILVFLAATGWMYLTFPHVDGSRKLAFAEGPRRNT

SEQ ID NO: 399 - DNA, 718 bp, Corynebacterium glutamicum
  CDS (101)..(688): RXA04075
taagaagtcgagttaaatattcctgtttttgtattataagcaattggactccctagtattcacggatggggagtcaatcgcaaaagctagactggcgtctatgactgacatgtggtttagctctgaccttcatttaggtcacaaattcgtggcatcgatgcggggtttcgacgatccagatgaacacgatgaagtaatactgagcaattttgagaacacgatcggcccagatgatgtgctgtggattctgggagatctttcctctggtgcccatcgcgctgaagagcgcgcgctgggcttaattgctgagcggctgggcggcgtcgtcaagcatcttgttcctggaaaccacgattcttgccacccgatgtaccggcatgcgtacaagcgacagcggcggtttttggaggtttttgattcggttcaggcgtttcagcggatgaaatgggacgacgaggatgtctacttgtcgcatttccctcggccgggccaagatcatccggggatggaatcgcggtttgatgatctccgcctgcgtgtgcctttgctgattcatgggcatttgcattcccagttccccatgacggggccggggcaggttgatgttggggtagaggcgtggggtttgaagccggcacctcgtgaattagtgcagctcaagctgtgggaatcgctgagcgagaagatttaaaagacaaagaaggcgcatcctaaggaa

SEQ ID NO: 400 - protein, 196 aa, Corynebacterium glutamicum
MTDMWFSSDLHLGHKFVASMRGFDDPDEHDEVILSNFENTIGPDDVLWILGDLSSGAHRAEERALGLIAERLGGVVKHLVPGNHDSCHPMYRHAYKRQRRFLEVFDSVQAFQRMKWDDEDVYLSHFPRPGQDHPGMESRFDDLRLRVPLLIHGHLHSQFPMTGPGQVDVGVEAWGLKPAPRELVQLKLWESLSEKI

SEQ ID NO: 401 - DNA, 472 bp, Corynebacterium glutamicum
  CDS (101)..(442): RXA04085
gatctggacggactcggcgccgcagtcgtgggcgagtatttacgacaccgctactgagcattggacgttttcgccttagccaggccagcaagaaccatgagtgatttgtgggtattgctgcctggcttaccagtccacacaacaacactctgctcagaatcataggggtctaacaaagtgtcccaatcaacggttaaacctggcaatatttggagtccatctcatcctcataggcgtgctgctgtgcctatcccttaaggttcctacgatcatcggcaccctagcggtcatcacaggcataggatatttagtcgatgcagtggcagtgctcctaggctccccaaatcctggcatttctgagttcacattcgtgggcgaagtggttctgtttatctggctgatctactccggagttaccgttccgaaggaggaaaggccatgctaacgagactttaaccgttactatgtagga

SEQ ID NO: 402 - protein, 114 aa, Corynebacterium glutamicum
VICGYCCLAYQSTQQHSAQNHRGLTKCPNQRLNLAIFGVHLILIGVLLCLSLKVPTIIGTLAVITGIGYLVDAVAVLLGSPNPGISEFTFVGEVVLFIWLIYSGVTVPKEERPC

SEQ ID NO: 403 - DNA, 349 bp, Corynebacterium glutamicum
  CDS (101)..(319): RXA04092
ttctattggccaagcaagctcactggggtgagcatggtgacaagacaatgcaggtagccgatgcagctgccgaaattaacgatgaaggggaggaacgccgatgatcttttcagaagagattctccataccgactggttcgcagcacttgctgctttcgtcgcgattaacacaacaatctatgtggttcttgctattgccaagacgctgccgaagatttatgtcactgactacttaccgcggaattatgagcgtgctgagacacgcagcatttatccagacgttgaagaaccgaaaaggaagaagtctgagaagaaggattagggcggataacgaatgcgcacggcttca

SEQ ID NO: 404 - protein, 73 aa, Corynebacterium glutamicum
MIFSEEILHTDWFAALAAFVAINTTIYVVLAIAKTLPKIYVTDYLPRNYERAETRSIYPDVEEPKRKKSEKKD

SEQ ID NO: 405 - DNA, 385 bp, Corynebacterium glutamicum
  CDS (101)..(355): RXA04095
ctgtgcctcctagcgatgagtagggagttggattatttacgcttcatcgctggggtggtcggacatacttgtgctggcatccacattactgtgagacctcgtgcctcctgggccgggtcaggttcctattagcagtttgagtatgtcactgtcttcggcggcatcaccccccggatcattttcagacagggacaggaataaaccataccgaagccagcgactagttccactgtcctttcggacggcgggaacggacataaacatagtccgccctctcgggtggacggactatgaatcttcggtgccctggggtggaactgctaacaacgtaatgggcaggcccaaaagaatactttaaaaggataagatttatatgacagcctga

SEQ ID NO: 406 - protein, 85 aa, Corynebacterium glutamicum
VPPGPGQVPISSLSMSLSSAASPPGSFSDRDRNKPYRSQRLVPLSFRTAGTDINIVRPLGWTDYESSVPWGGTANNVMGRPKRIL

SEQ ID NO: 407 - DNA, 310 bp, Corynebacterium glutamicum
  CDS (101)..(280): RXA04101
ggcgtccaatgacccgatcagtccttttgatgccaatgaggatgcatcacgcttccctaccgtggcaatcaccaatcctgaagctaaggagtcctaaatcatgggaactactgcaatcatcatgatggtgttgttcatggtcatcatttggggtggcctggtttatgccaccatcgcacttcgacgcgaaccagatgagaaggttggactgtttggaacctctccatatgccaccgactctgttcttattgagcaagagtctgaacgacctgcaacggcctaaagatctctgtaggaaacactcccgcca

SEQ ID NO: 408 - protein, 60 aa, Corynebacterium glutamicum
MGTTAIIMMVLFMVIIWGGLVYATIALRREPDEKVGLFGTSPYATDSVLIEQESERPATA

SEQ ID NO: 409 - DNA, 382 bp, Corynebacterium glutamicum
  CDS (101)..(352): RXA04169
tcccagggtggttgaccactcaagcatgcaagcgtcacaaatattccggacattctgactaatttccctagagctgtagacagcagtcctgatgaatcaaatgaaacgccttatctctgtcgttgggactacatttatctttgcaactagctgctcagcaaccgattccgaggttgattcgccagctccgacaagtggagttacagtctcttcaattatcagatcttttgaacccaatagaaaagaagaactccttaacaagctcgtaaggttggctcctgtaaaccaagtcaatccacgcagagcttcccgtatcaggaaattacgatttcccaactccagtcgacctaggtgagccagattccgctgagatctacacaga

SEQ ID NO: 410 - protein, 84 aa, Corynebacterium glutamicum
MKRLISVVGTTFIFATSCSATDSEVDSPAPTSGVTVSSIIRSFEPNRKEELLNKLVRLAPVNQVNPRRASRIRKLRFPNSSRPR

SEQ ID NO: 411 - DNA, 451 bp, Corynebacterium glutamicum
  CDS (101)..(421): RXA04172
catgatggtttgggaaacgttgtgaatattgacatctagctcagccaacgcggtggaaactgcggcgataattccggtgtggtcctgccctgtgacagtcatgattgcaaacatgggttcatgctacaacgagcggtggacacgacactttgggtctatcatttggggtatgccaactctatttaatcgctcgtccaagacatataaatcattgcacgctgattggttggatttgcccactgaactgcgttttccagtcattgctgtcgcggtcgcagaatttgccaccaaagtgtccgtgtgggtgtcgctgagtcggcgcgcacctgaaaaagtccgcggccccaaatgggtatgggcgcttttgaccatcgtcaatggtgttggccccgctgcctactgggctttcggcaggaaaaactaagagttgttagggtggcgctcatgacta

SEQ ID NO: 412 - protein, 107 aa, Corynebacterium glutamicum
MIANMGSCYNERWTRHFGSIIWGMPTLFNRSSKTYKSLHADWLDLPTELRFPVIAVAVAEFATKVSVWVSLSRRAPEKVRGPKWVWALLTIVNGVGPAAYWAFGRKN

SEQ ID NO: 413 - DNA, 481 bp, Corynebacterium glutamicum
  CDS (101)..(451): RXA04181
tggtttcgtcgatgaatactgttgttactgcgtgagctggtgatgagccagaatcaggtgactggaatgcctgtggttcacgcttaggggatgattcacaatgaagaagccaactctatatttaaatctcgaatatggaatccgaaactcgctgtgggcggacaaggtgccatttccgaggaaaggggtacggtttgtgacgtatcctgatgaattaggtttatcgaacgagttgagtgaaaaaatccagctgtggactcgctactggttagcaaattttgttgatgtcgaagatgctcccaaagggcgtccgcagtggaaagctggatctgatgttgagtcgtgggtagcgcaaggtgacattattgaaagcgcgctccgtgcagaattgcctgattttgcggtgttctcaaaatggagattttatggactcaatgttcgttttgtgcaataaagtacgtctttgaagttgtaagtccaa

SEQ ID NO: 414 - protein, 117 aa, Corynebacterium glutamicum
MKKPTLYLNLEYGIRNSLWADKVPFPRKGVRFVTYPDELGLSNELSEKIQLWTRYWLANFVDVEDAPKGRPQWKAGSDVESWVAQGDIIESALRAELPDFAVFSKWRFYGLNVRFVQ

SEQ ID NO: 415 - DNA, 307 bp, Corynebacterium glutamicum
  CDS (101)..(277): RXA04319
tgtcggataaccaggctcctgcggagttgaagccgaagaagtcttgagttttctgaaggctttctggaggttttagagagaatcagcgcccgggagctgtttgggactctcctgggcgctgatttttgttatttcagggtggttttcgggtttattgtggcctgggtatgccccgagtaggccgatgtgcaagggcgactccgcagaaccggacaggcgtgctaaaatgtcgaattttcagcacatcttggcacatgtgtctggtttcaagctctcataaccggacacacgtgccaaaacctacgga

SEQ ID NO: 416 - protein, 59 aa, Corynebacterium glutamicum
LGLSWALIFVISGWFSGLLWPGYAPSRPMCKGDSAEPDRRAKMSNFQHILAHVSGFKLS

SEQ ID NO: 417 - DNA, 349 bp, Corynebacterium glutamicum
  CDS (101)..(319): RXA04337
ggcatctgtgactggtttcgaggtcttgaaaccaaaccacgatgcccacgaatcatgaaaatggatttggtgggcaccgtggtttgatcgcggcactcgaatgctgaatcaggcggggctcgggccagaccagtgggacaaagaatctgaaaatccgacatctttgtcacatgtgccaggttttgcggagttgaagagccgcggacacccctcccagcccaagcgagcatgcaaaaagctgcgcaccccacctaaacaaaccggaaaaccggaatcgcagggatgcgcagctcttaatttacaaaagacttatgccttgtagcggtcgattgcctcagcgtggatcttt

SEQ ID NO: 418 - protein, 73 aa, Corynebacterium glutamicum
MLNQAGLGPDQWDKESENPTSLSHVPGFAELKSRGHPSQPKRACKKLRTPPKQTGKPESQGCAALNLQKTYAL

SEQ ID NO: 419 - DNA, 313 bp, Corynebacterium glutamicum
  CDS (101)..(283): RXA04352
gcgctagaaacttgtcccgaggggctgggttggtgtgcacactgctgtggctttgtgtgtgcacaacctagtgggatagggcgtgcacaaggatatgacattgggtgtgcacaacgtgctgacactttacaaggggaaaccagacaggcgtgacaaaaatctagatttccgccaggttttggcacgcctgtccggtttaggggattggaaaccggacacacgtgacagaacttcgagtttttcgccaatcttgtcacgcctgtctggtttgcctcgagaagggtgattcacggccaagacttctaaaagttcg

SEQ ID NO: 420 - protein, 61 aa, Corynebacterium glutamicum
LGVHNVLTLYKGKPDRRDKNLDFRQVLARLSGLGDWKPDTRDRTSSFSPILSRLSGLPREG

SEQ ID NO: 421 - DNA, 322 bp, Corynebacterium glutamicum
  CDS (101)..(292): RXA04354
gtaaccgatgttctgggagggctgcggttggaggtaaagcctcatcgtggcaagtctagcgataccttaagcttttttaaaccttttacaacagacgttcttgcttctttacaacaatcactttaaggagatcactatgtttgatcagttccagcagttcaccgacattgcacagaacttccagggcgcacagtggggtgtccagattcaggagcagttccagcagcacttccagaattggtttaacaccgaaactgtagagccagccaagagcactttctccctcagctcctagtcgctctttaaggtcaatgtttcacgt

SEQ ID NO: 422 - protein, 64 aa, Corynebacterium glutamicum
LLLYNNHFKEITMFDQFQQFTDIAQNFQGAQWGVQIQEQFQQHFQNWFNTETVEPAKSTFSLSS

SEQ ID NO: 423 - DNA, 436 bp, Corynebacterium glutamicum
  CDS (101)..(406): RXA04370
cgtcacccttgtccttgcggacaacctcgaggaatttatccagggacggggcaacagtgcgctcatcctgagaaggatcgagaatgatcataagttcgtattgacgcacggacctcatcacctcctatggtctagtaattgttttttcggccatgccgtcgttggcatagcaggagggtcgttgcgtcagcaacctattcaaggtacaccaaacgcgcggaaatgtcgattcctgatttatgcgttttcgttcacagttcccgcatggaagttatgctctgcttccagcggcctcgcttcagcggtggagatgcttgccaacgtcaaagctgaagccgcgagcatgcctacaaaggtggttgaagtcttagattttttcatctgttacctgcctttctaccttccttaacgcacttagttagaggaaagttcccac

SEQ ID NO: 424 - protein, 102 aa, Corynebacterium glutamicum
LTHGPHHLLWSSNCFFGHAVVGIAGGSLRQQPIQGTPNARKCRFLIYAFSFTVPAWKLCSASSGLASAVEMLANVKAEAASMPTKVVEVLDFFICYLPFYLP

SEQ ID NO: 425 - DNA, 1321 bp, Corynebacterium glutamicum
  CDS (101)..(1291): RXA04546
aaactacgttggtagcaccgcggcgaagataacttgcaccggaattatgcgtggttacaagacgtgccaaatccatgggaatcgtgctgttcagtagctgttggtacacaccgaccgcgtcagcatccatagggccaagaatggtgtacgacgcacgcggaaacatattaaaaccatctgtattaagcatcccatcggcagatccgtacagataagccactcgcccaccgcgttatctgatgcggaaaacaatgctgaactcaccactgcacagattctgcacattgaccccgtcaccggtgtggccatcccacgtcaaaacattctgctgggtgaggattttcagactatggccagctcttttagtcaaatccgccatggatggggtatcacccagctcatcggacaagaccccaacagaaaccaaccaatccgctctgctgatacgtggacagtgactggatcgactggactcaccggctttaatactgctacgcataatacagatgacacagacgccactgccgcatataccatgccggcaagcgatcctgccgtaggactatgcgcactggaatccaacaaagacgcaccggtggatgaatttcgcgatctcagcctcagtgctttacgtaccgctacggtcatgtcaagctctggctccgccgtgattactatgcatgatcctatggtcatgagcaccactggcgcattggaagcacgtgcatacgttgacggcgaagtcatcaaccagcacgatcttgactcactgcgtgaccagctaggtattactacagacagcgcagataccacccctgccctacctgctgatcccttggcagcattgggcttgagcacaccaactacatcagctcttgtcccaggtcttgccgagctggactgcctcaacactgatcaagctcgcacctggcatgaccgtgacaacagcattggcactggtaaaccagctattcttgccgtgattaacgccgagctcgctgatgattacaccctgcagatcctcaaaaatagcactgcgacccccaccgactccaccgactccagcgatactgctgaacgcttcgtagcgcagctacctgcggaaacagcctttgtgcttattgatccggacatcggcgctgtgaccgatctgttctttatcaacagcataaatcaggatctccccgcaccgacaacccagatcaactcagtagcggtagatcaacgtgaccccaacatcatctacgcgacctttgccaatgatgaccgcgtgtaccagctcatgctgggttaaccgcgacccgtttttatctgtgctgat

SEQ ID NO: 426 - protein, 397 aa, Corynebacterium glutamicum
LVHTDRVSIHRAKNGVRRTRKHIKTICIKHPIGRSVQISHSPTALSDAENNAELTTAQILHIDPVTGVAIPRQNILLGEDFQTMASSFSQIRHGWGITQLIGQDPNRNQPIRSADTWTVTGSTGLTGFNTATHNTDDTDATAAYTMPASDPAVGLCALESNKDAPVDEFRDLSLSALRTATVMSSSGSAVITMHDPMVMSTTGALEARAYVDGEVINQHDLDSLRDQLGITTDSADTTPALPADPLAALGLSTPTTSALVPGLAELDCLNTDQARTWHDRDNSIGTGKPAILAVINAELADDYTLQILKNSTATPTDSTDSSDTAERFVAQLPAETAFVLIDPDIGAVTDLFFINSINQDLPAPTTQINSVAVDQRDPNIIYATFANDDRVYQLMLG

SEQ ID NO: 427 - DNA, 829 bp, Corynebacterium glutamicum
  CDS (101)..(799): RXA04549
cgtttcgatcatttgtaacattcttattacaagactggaaataaaggtgagtcaatcatacagtcagatgtggtcatcggcaaaacagaaaggaatcccgatgttacgaaaaacagttaccggtggaattgttgctcttattgcgactgccactctcatgaattctgtctcttctgctgaagaggtatccggagatgtctcagcagtagatctcgcatttgcagaattcgaacgtacaactgcagaggacgtggccaatggagtgccagaggctatagctaatgcagaaaaaatttccaatttcactccgagcgaactagagggcttcaagagtcttttagctagtgatgcagtgctgaggtcggtctctggagaagaaattctcccagataatgttgaagtggttcagacggacaacgtaggcgacgaagatccaaatgtcatttctccagcagcctggcagggttctgattatattgaggggtgtttaacgaatactctctacggaattgaagtcctaaaggtttgtactggtggaacctactactccaatgtaggaatcgctacttctgtcagcaatcctcgcagttacgtaaagtataacagtgctccaggattggcagtgacgacaagcaatccacgtggaggtatagagggtggtcttgcggccttctatggtgatgttaaccttgttgcttttccaaatattccatgggtgggaccaattagttcttctgcaggaactcaccgcgttgtcgctagatcatttccgaattcagtggtgcttaacgtctactactaatcgttttttagtttgaaacactgttgt

SEQ ID NO: 428 - protein, 233 aa, Corynebacterium glutamicum
MLRKTVTGGIVALIATATLMNSVSSAEEVSGDVSAVDLAFAEFERTTAEDVANGVPEAIANAEKISNFTPSELEGFKSLLASDAVLRSVSGEEILPDNVEVVQTDNVGDEDPNVISPAAWQGSDYIEGCLTNTLYGIEVLKVCTGGTYYSNVGIATSVSNPRSYVKYNSAPGLAVTTSNPRGGIEGGLAAFYGDVNLVAFPNIPWVGPISSSAGTHRVVARSFPNSVVLNVYY

SEQ ID NO: 429 - DNA, 484 bp, Corynebacterium glutamicum
  CDS (101)..(454): RXA04642
tatttagtggaaatttcctgttggtgttcatcgtgacggtcttgttgacgatcccagttgccgccatcagctacaccttcatcgaagagcccatcatgcggtggacccggcgcgccattcaggctgggggtcgttaggattcaccatttttctgggggtaggtctggaaaatgatgaattggcaccacgtcaagacggggacggggcatggcaagccggtaagggaactaatttgctaatactcaccacaggatccggattttcagccgtttgtggtggatttttgcaactcgccggcggttttatgcaaaaatccgttcgatttgaaggtctggccacaggattgtggtggatccttgatcaacaagctgacaggaatcacaggagccccaatggtcacaaattctaccctctctacaatcgcctccaagggcctagaatcgtcagaatgaactgacacccatttagcgctttggaggcctta

SEQ ID NO: 430 - protein, 118 aa, Corynebacterium glutamicum
VDPARHSGWGSLGFTIFLGVGLENDELAPRQDGDGAWQAGKGTNLLILTTGSGFSAVCGGFLQLAGGFMQKSVRFEGLATGLWWILDQQADRNHRSPNGHKFYPLYNRLQGPRIVRMN

SEQ ID NO: 431 - DNA, 790 bp, Corynebacterium glutamicum
  CDS (101)..(760): RXA06004
agctgcctgcaagatggcggcggagaagattcccgctggatccaaggtgtatgttttgggttcagaatccttccgcgagctagctactgaagctggttttgtggtggttgattcggctgatgataaacctgtggctgtgcttcacggccacaaccctgagaccggttgggctcagttgagcgaggctgcgctgtcaattaatgctggcgcgcagtattttgcatcaaatttggattccacccttcccatggaacgcggtcgtcacattggcaacggttccatggtggctgccgtggtcaacgcgactggcgtaaagcctctttccgcaggtaagccaggccccgcgatgttctatgcgggggctaaaactcttaattcttcaaagcctttggctgtcggcgatcgtctcgatactgatattgcaggcggaaacgctgcaggcatggacacattccaggtcctgaccggcgtcagcggctactacgatttggtgcgcgccattccagagcagcgccccacctatatcgccacctcgatgcaggatctctacagcgatccgggcgagctcaagccaggtgcccagggcggtttttcagcgcttatcgacggcgacaccctggtcatttccggcggcgatgccggcgcaactccggttgcagcactccgcactgcgttggatgtggcctgggcggccacagagccagtcaccgaggtacgcgctgattcagaggtagctgctactgcattgcagagctggtggtaaacggtgaattcaccaaagcctcatgat

SEQ ID NO: 432 - protein, 220 aa, Corynebacterium glutamicum
VVVDSADDKPVAVLHGHNPETGWAQLSEAALSINAGAQYFASNLDSTLPMERGRHIGNGSMVAAVVNATGVKPLSAGKPGPAMFYAGAKTLNSSKPLAVGDRLDTDIAGGNAAGMDTFQVLTGVSGYYDLVRAIPEQRPTYIATSMQDLYSDPGELKPGAQGGFSALIDGDTLVISGGDAGATPVAALRTALDVAWAATEPVTEVRADSEVAATALQSWW

SEQ ID NO: 433 - DNA, 430 bp, Corynebacterium glutamicum
  CDS (101)..(400): RXA06040
cccgagtctacgcaaaactgcactctgctgaacgctcatttgaaaaaatgggggatggttcggggtcttcatcaggggtgaaggtggtgcgcccttaggtttggagggacttcgtaagattccggctttacttcgggcgtcacttcaggcctgtatcgccagttttggccttggcgcccgcgatttcgccccagacgacctcaattcaagggggtccaatcctaaaaccggactaaaaccagactgtaaagtgtcagcacgttgtgcacactcaatatcatatccttgcgcacgcccgatcccactaggttgtgcacacacaaagccacagcagtgtgcacaccaaccctcaccctcgggacaagtttctagcgcagtagatcccccggatctatcgacttaaatcgcttctcagcctcatcacgtttgc

SEQ ID NO: 434 - protein, 100 aa, Corynebacterium glutamicum
LEGLRKIPALLRASLQACIASFGLGARDFAPDDLNSRGSNPKTGLKPDCKVSARCAHSISYPCARPIPLGCAHTKPQQCAHQPSPSGQVSSAVDPPDLST

1. An isolated nucleic acid molecule, coding for a polypeptide having the amino acid sequence in each case referred to in Table 1/column 2, wherein the nucleic acid molecule in the amino acid position indicated in Table 1/column 4 encodes a proteinogenic amino acid different from the particular amino acid indicated in Table 1/column 5 in the same row.

2. An isolated nucleic acid molecule as claimed in claim 1, wherein the nucleic acid molecule in the amino acid position indicated in Table 1/column 4 encodes the amino acid indicated in Table 1/column 6 in the same row.

3. A vector, which comprises at least one nucleic acid sequence as claimed in claim 1.

4. A host cell, which is transfected with at least one vector as claimed in claim 3.

5. A host cell as claimed in claim 4, wherein expression of said nucleic acid molecule modulates the production of a fine chemical from said cell.

6. A method for preparing a fine chemical, which comprises culturing a cell which has been transfected with at least one vector as claimed in claim 3 so that the fine chemical is produced.

7. A method as claimed in claim 6, wherein the fine chemical is an amino acid.

8. A method as claimed in claim 7, wherein said amino acid is lysine.
